United States Patent Application Publication US 2019/0002960 A1 - sequence listing, part 12

SEQ ID NO: 12 - DNA, 2692570 bp, Staphylococcus aureus subsp. aureus VC40 (residues 1-1,346,285 of 2,692,570)
cgattaaagatagaaatacacgatgcgagcaatcaaatttcataacatcaccatgagtttggtccgaagcatgagtgtttacaatgttcgaacaccttatacagttcttatacatactttataaattatttcccaaactgttttgatacactcactaacagatactctatagaaggaaaagttatccacttatgcacatttatagttttcagaattgtggataattagaaattacacacaaagttatactatttttagcaacatattcacaggtatttgacatatagagaactgaaaaagtataattgtgtggataagtcgtccaactcatgattttataaggatttatttattgatttttacataaaaatactgtgcataactaataagcaagataaagttatccaccgattgttattaacttgtggataattattaacatggtgtgtttagaagttatccacggctgttatttttgtgtataacttaaaaatttaagaaagatggagtaaatttatgtcggaaaaagaaatttgggaaaaagtgcttgaaattgctcaagaaaaattatcagctgtaagttactcaactttcctaaaagatactgagctttacacgattaaagatggtgaagctatcgtattatcgagtattccttttaatgcaaattggttaaatcaacaatatgctgaaattatccaagcaatcttatttgatgttgtaggctatgaagttaaacctcactttattactactgaagaattagcaaattatagtaataatgaaactgctactccaaaagaaacaacaaaaccttctactgaaacaactgaggataatcatgtgcttggtagagagcaattcaatgcccataacacatttgacacttttgtaatcggacccggtaaccgctttccacatgcagcgagtttagctgtggccgaagcaccagccaaagcgtacaatccattatttatctatggaggtgttggtttaggaaaaacccatttaatgcatgccattggtcatcatgttttagataataatccagatgccaaagtgatttacacatcaagtgaaaaattcacaaatgaatttattaaatcaattcgtgataacgaaggtgaagctttcagagaaagatatcgtaatatcgacgtcttattaatcgatgatattcagttcatacaaaacaaggtacaaacacaagaagaatttttctatacttttaatgaattgcatcagaataacaagcaaatagttatttcgagtgatcgaccaccaaaggaaattgcacaattagaagaccgattacgttcacgctttgaatgggggctaattgttgatattacgccaccagattatgaaactcgaatggcaattttgcagaagaaaattgaagaagaaaaattagatattccaccagaagctttaaattatatagcaaatcaaattcaatctaatattcgtgaattagaaggtgcattaacacgtttacttgcatattcacaattattaggaaaaccaattacaactgaattaactgctgaagctttaaaagatatcattcaagcaccaaaatctaaaaagattaccatccaagatattcaaaaaattgtaggccagtactataatgttagaattgaagatttcagtgcaaaaaaacgtacaaagtcaattgcatatccgcgtcaaatagctatgtacttgtctagagagcttacagatttctcattacctaaaattggtgaagaatttggtgggcgtgatcatacgaccgtcattcatgctcatgaaaaaatatctaaagatttaaaagaagatcctatttttaaacaagaagtagagaatcttgaaaaagaaataagaaatgtataagtaggaaactttgggaaatgtaatctgttatataacagcactaatgataacaatcattttttacatttctatatgctaatgtggcaagatgagcaaaactcattttgtggataatgtttaaaagtcatacacaccatacacaagttatcaacatgtgtataacttcgccaaatctatgtttttaagacttatccaccaatccacagcacctactactattactaagaacttaaaacctatataattatatataaacgactggaaggagttttaattaatgatggaattcactattaaaagagattattttattacacaattaaatgacacattaaaagctatttcaccaagaacaacattacctatattaactggtatcaaaatcgatgcgaaagaacatgaagttatattaactggttcagactctgaaatttcaatagaaatcactattcctaaaactgtagatggcgaagatattgtcaatatttcagaaacaggctcagtagtacttcctggacgattctttgttgatattataaaaaaattacctggtaaagatgttaaattatctacaaatgaacaattccagacattaattacatcaggtcattctgaatttaatttaagtggcttagatccagatcaatatcctttattacctcaagtttctagagatgacgcaattcaattgtcggtaaaagtgcttaaaaacgtgattgcacaaacaaattttgcagtgtccacctcagaaacacgcccagtactaactggtgtgaactggcttatacaagaaaatgaattaatatgcacagcgactgactcacaccgcttggctgtaagaaagttgcagttagaagatgtttctgaaaacaaaaatgtcatcattccaggtaaggctttagctgaattaaataaaattatgtctgacaatgaagaagacattgatatcttctttgcttcaaaccaagttttatttaaagttggaaatgtgaactttatttctcgattattagaaggacattatcctgatacaacacgtttattccctgaaaactatgaaattaaattaagtatagacaatggggagttttatcatgcgattgatcgtgcctctttattagcgcgtgaaggtggtaataacgttattaaattaagtacaggtgatgacgttgttgaattgtcttctacatcaccagaaattggtactgtaaaagaagaagttgatgcaaacgatgttgaaggtggtagcctgaaaatttcattcaactctaaatatatgatggatgctttaaaagcaatcgataatgatgaggttgaagttgaattcttcggtacaatgaaaccatttattctaaaaccaaaaggtgacgactcggtaacgcaattaattttaccaatcagaacttactaaaaataaatataaataaaggatgacgtgattaattaaaacgtcatcctttattttttggcaaaaataattctaggtgcgtatgtaaaataaatttggcagcattttaaacagcaaataaaagacgccaattaaatttatgacaaatgtatccaaaatttaataagtgtgcttatatgccctttaaatttaaaattttaatagtcaataacaagttgaatataaaagttaaacgccgttaaatagcgttaaaaaattgaaaatgacagtattgccaaaaaataagaattaattatttatatgtaaacggtttctacctctattttaaatgaaatttgtgacaaaaaaaggtataatatattaatgacatacaaagaaatggagtgattattttggttcaagaagttgtagtagaaggagacattaatttaggtcaatttctaaaaacagaagggattattgaatctggtggtcaagcaaaatggttcttgcaagacgttgaagtattaattaatggagtgcgtgaaacacgtcgcggtaaaaagttagaacatcaagatcgtatagatatcccagaattacctgaagatgctggttctttcttaatcattcatcaaggtgaacaatgaagttaaatacactccaattagaaaattatcgtaactatgatgaggttacgttgaaatgtcatcctgacgtgaatatcctcattggagaaaatgcacaaggaaagacaaatttacttgaatcaatttataccttagctttagcaaaaagtcatagaacgagtaatgataaggaactcatacgttttaatgctgattatgctaaaatagaaggtgagcttagttatagacacggcacgatgccattaacaatgtttataactaaaaaaggtaaacaagtcaaagtgaatcacttagagcaaagtcgtctaactcaatatattggacacctcaatgtggttctatttgcgccagaagatttgaatattgtaaaaggctctcctcaaataagacgacgctttatagatatggagttgggccaaatttctgctgtttacttaaatgatttagctcaataccaacgtattttaaagcaaaagaataattacttaaagcagttacaattaggccaaaaaaaggacttaacaatgttggaagtattaaatcagcagtttgctgaatatgcaatgaaagtaactgataaacgtgcacattttattcaagagctagagtcgttagctaaaccgattcatgctggtatcacaaatgataaagaagcgttgtcgctgaattatttacctagtcttaaatttgattatgctcaaaatgaagcggcacgacttgaagaaattatgtctattcttagcgataatatgcaaagagaaaaagaacgaggcattagcttattcggaccacatcgagatgatataagttttgatgtgaatggcatggatgctcaaacatatggttctcaaggacagcaacgtacaacggctttgtccattaaattagctgaaattgagttaatgaatatcgaagttggggaatatcccatcttattattagacgatgtactcagtgaattagatgattcgcgtcaaacgcatttattaagtacgattcagcataaagtacaaacatttgtcactacgacatctgtagatggtattgatcatgaaatcatgaataacgctaaattgtatcgtattaatcaaggtgaaattataaagtaacagaaagcgatggtgactgcattgtcagatgtaaacaacacggataattatggtgctgggcaaatacaagtattagaaggtttagaagcagtacgtaaaagaccaggtatgtatataggatcgacttcagagagaggtttgcaccatttagtgtgggaaattgtcgataatagtatcgatgaagcattagctggttatgcaaatcaaattgaagttgttattgaaaaagataactggattaaagtaacggataacggacgtggtatcccagttgatattcaagaaaaaatgggacgtccagctgtcgaagttattttaactgttttacatgctggtggtaaatttggcggtggcggatacaaagtatctggtggtttacatggtgttggttcatcagttgtaaacgcattgtcacaagacttagaagtatatgtacacagaaatgagactatatatcatcaagcatataaaaaaggtgtacctcaatttgacttaaaagaagttggcacaactgataagacaggtactgtcattcgttttaaagcagatggagaaatcttcacagagacaactgtatacaactatgaaacattacagcagcgtattagagagcttgctttcttaaacaaaggaattcaaatcacattaagagatgaacgtgatgaagaaaacgttagagaagactcctatcactatgagggcggtattaaatcgtacgttgagttattgaacgaaaataaagaacctattcatgatgagccaatttatattcatcaatctaaagatgatattgaagtagaaattgcgattcaatataactcaggatatgccacaaatcttttaacttacgcaaataacattcatacgtatgaaggtggtacgcatgaagacggattcaaacgtgcattaacgcgtgtcttaaatagttatggtttaagtagcaagattatgaaagaagaaaaagatagactttctggtgaagatacacgtgaaggtatgacagcaattatatctatcaaacatggtgatcctcaattcgaaggtcaaacgaagacaaaattaggtaattctgaagtgcgtcaagttgtagataaattattctcagagcactttgaacgatttttatatgaaaatccacaagtcgcacgtacagtggttgaaaaaggtattatggcggcacgtgcacgtgttgctgcgaaaaaagcgcgtgaagtaacacgtcgtaaatcagcgttagatgtagcaagccttccaggtaaattagccgattgctctagtaaaagtcctgaagaatgtgagattttcttagtcgaaggggactctgccggggggtctacaaaatctggtcgtgactctagaacgcaggcgattttaccattacgaggtaagatattaaatgttgaaaaagcacgattagatagaattttgaataacaatgaaattcgtcaaatgatcacagcatttggtacaggaatcggtggcgactttgatctagcgaaagcaagatatcacaaaatcgtcattatgactgatgccgatgtggatggagcgcatattagaacattgttattaacattcttctatcgatttatgagaccgttaattgaagcaggctatgtgtatattgcacagccaccgttgtataaactgacacaaggtaaacaaaagtattatgtatacaatgatagggaacttgataaacttaaatctgaattgaatccaacaccaaaatggtctattgcacgatacaaaggtcttggagaaatgaatgcagatcaattatgggaaacaacaatgaaccctgagcaccgcgctcttttacaagtaaaacttgaagatgcgattgaagcggaccaaacatttgaaatgttaatgggtgacgttgtagaaaaccgtagacaatttatagaagataatgcagtttatgcaaacttagacttctaagcgctgtgaactgaacttttgaaggaggaactcttgatggctgaattacctcaatcaagaataaatgaacgaaatattaccagtgaaatgcgtgaatcatttttagattatgcgatgagtgttatcgttgctcgtgcattgccagatgttcgtgacggtttaaaaccagtacatcgtcgtatactatatggattaaatgaacaaggtatgacaccggataaatcatataaaaaatcagcacgtatcgttggtgacgtaatgggtaaatatcaccctcatggtgactcatctatttatgaagcaatggtacgtatggctcaagatttcagttatcgttatccgcttgttgatggccaaggtaactttggttcaatggatggagatggcgcagcagcaatgcgttatactgaagcgcgtatgactaaaatcacacttgaactgttacgtgatattaataaagatacaatagattttatcgataactatgatggtaatgaaagagagccgtcagtcttacctgctcgattccctaacttattagccaatggtgcatcaggtatcgcggtaggtatggcaacgaatattccaccacataacttaacagaattaatcaatggtgtacttagcttaagtaagaaccctgatatttcaattgctgagttaatggaggatattgaaggtcctgatttcccaactgctggacttattttaggtaagagtggtattagacgtgcatatgaaacaggtcgtggttcaattcaaatgcgttctcgtgcagttattgaagaacgtggaggcggacgtcaacgtattgttgtcactgaaattcctttccaagtgaataaggctcgtatgattgaaaaaattgcagagctcgttcgtgacaagaaaattgacggtatcactgatttacgtgatgaaacaagtttacgtactggtgtgcgtgtcgttattgatgtgcgtaaggatgcaaatgctagtgtcattttaaataacttatacaaacaaacacctcttcaaacatcatttggtgtgaatatgattgcacttgtaaatggtagaccgaagcttattaatttaaaagaagcgttggtacattatttagagcatcaaaagacagttgttagaagacgtacgcaatacaacttacgtaaagctaaagatcgtgcccacattttagaaggattacgtatcgcacttgaccatatcgatgaaattatttcaacgattcgtgagtcagatacagataaagttgcaatggaaagcttgcaacaacgcttcaaactttctgaaaaacaagctcaagctattttagacatgcgtttaagacgtctaacaggtttagagagagacaaaattgaagctgaatataatgagttattaaattatattagtgaattagaagcaatcttagctgatgaagaagtgttattacagttagttagagatgaattgactgaaattagagatcgtttcggtgatgatcgtcgtacagaaattcaattaggtggatttgaagacttagaggacgaagacttaattccagaagaacaaatagtaattacactaagccataataactacattaaacgtttgccggtatctacatatcgtgctcaaaaccgtggtggtcgtggtgttcaaggtatgaatacattggaagaagattttgtcagtcaattggtaactttaagtacacatgaccatgtattgttctttactaacaaaggtcgtgtatacaaacttaaaggttacgaagtgcctgagttatcaagacagtctaaaggtattcctgtagtgaatgctattgaacttgaaaatgatgaagtcattagtacaatgattgctgttaaagaccttgaaagtgaagacaacttcttagtgtttgcaactaaacgtggtgtcgttaaacgttcagcattaagtaacttctcaagaataaatagaaatggtaagattgcgatttcgttcagagaagatgatgagttaattgcagttcgcttaacaagtggtcaagaagatatcttgattggtacatcacatgcatcattaattcgattccctgaatcaacattacgtcctttaggccgtacagcaacgggtgtgaaaggtattacacttcgtgaaggtgacgaagttgtagggcttgatgtagctcatgcaaacagtgttgatgaagtattagtagttactgaaaatggttatggtaaacgtacgccagttaatgactatcgcttatcaaatcgtggtggtaaaggtattaaaacagctacgattactgagcgtaatggtaatgttgtatgtatcactacagtaactggtgaagaagatttaatgattgttactaatgcaggtgtcattattcgactagatgttgcagatatttctcaaaatggtcgtgcagcacaaggtgttcgcttaattcgcttaggtgatgatcaatttgtttcaacggttgctaaagtaaaagaagatgcagaagatgaaacgaatgaagatgagcaatctacttcaactgtatctgaagatggtactgaacaacaacgtgaagcggttgtaaatgatgaaacaccaggaaatgcaattcatactgaagtgattgattcagaagaaaatgatgaagatggacgtattgaagtaagacaagatttcatggatcgtgttgaagaagatatacaacaatcatcagatgaagaataataaaaaataagacttccctatatgtaggggagtcttatttttatgctagaaagtaatgctttactatattcaatgattagtaatgactaactttctaattgtttcattgcgtaaggtatttcattgataagtcttgatggtggcaccacatacatatcttttgcaaggttttcgccaataaaactatgtgtatatgtggcactcataaccgcttcttttaagttatcaaattgaccgacaaagcttgtaatcataccagcaagtgtatcgcccataccaccagtcgccattgctgggctaccgattgtcaatttaaagtcttcatctttaaagaaaatttcagtaccatgttttttaagtacaacagttgcacctaaacgatcaactgcttcacgattacgctcatatgtctgttcctcaataggaataccacttaatcgttcccattctttgaggtgtggtgtaaagatcacacgacatgtaggtaattgcggtttcagtttactaaagattgtaatcgcatcgccgtctacgattaaattttgatgcggttgtatattttgtagtaggaatgtaatggcattatttcctttgaaatcaacgccaagacctggaccaattagtatactgtcagtcatttcaatcattttcgtcaacattttcgtatcattaatatcaataaccatcgcttctgggcaacgagaatgtaatgctgaatgatttgttggatgtgtagctacagtgattaaaccactaccgctaaatacacatgcacgagccgctaacataatggcaccacctaagttagcagatccaccaattaataaaattttgccataatcacctttatgtgaatcttctttacgcttaggaatgttaatagaatttaacgtttccatagtgatataacctcccatgtaaaagccttttccgaatttattcaattttaaaaatatatagtaacttttaacaaaatgtattataaatttctgaattcattattatttgtcgttaaatacaatagaaaatactatacctgtatatgcaattcgtcaatagataaattattaaatatgcttacaacaatcttaatatcctttaacgcactacaatagtgctctgataataggttataaatgtacgtaaaaccattgtttcaataaaaatgaaaacgtatacttcaagaaggatgggttacttaatataaacaagggggtaacatatatgactttatatttagatggtgaaacactaacaattgaggatattaaatcatttttacaacaacaatcaaagattgaaattattgatgatgcgttagaacgtgtcaaaaaaagtagagcggtagttgaacgtattattgaaaatgaggaaacggtttacggtattactacaggttttgggttatttagtgatgtacgtatagacccgacgcaatataatgaattacaagtgaatctgatacgctcacatgcctgtggactaggtgagccattttcaaaagaagtagcattagtcatgatgattttacgattgaatacattattaaaaggtcattcaggtgccactttagaattagtgagacaattacaattttttataaatgaacgtattataccgataatcccacagcaaggctctctcggtgcatcaggagatttagcgccattatcacatttagcattagcattaattggtgaagggaaagtattgtacagaggggaagaaaaggatagtgacgatgtattaagagaattaaatagacaacctttgaaccttcaggctaaagaaggtttagcattgattaatggtacgcaagctatgacagctcaaggtgtcattagttatatagaagcagaagatttaggttaccaatctgaatggattgctgcattaacgcatcagtctcttaatggcattatagatgcatatcgacatgatgtgcacgcagttcgtaattttcaagaacagattaatgtggcagcgcgtatgcgtgattggttagaaggatcaacattaacgacgcgacaatcagaaatacgtgtacaagatgcatatacgttgcgttgtataccacaaatccatggcgcgagttttcaagtattcaattatgttaaacagcaattagaatttgaaatgaatgcggctaatgataatccacttatatttgaggaagcaaatgaaacgtttgttatttcaggtggtaacttccatggacaacctattgcttttgcattagatcatcttaaattaggtgtaagtgaattagcaaacgtatcggaacgtcgtctagagcgactagtaaatcctcaattaaatggtgatttaccagcatttcttagtccagagccaggattgcaaagtggcgcgatgattatgcaatatgctgctgcaagtctcgtttctgaaaataaaactttagcgcatccagcgagtgttgattctatcacttcatctgcgaaccaagaagatcacgtatctatgggaactacagctgctagacatggttatcaaattattgaaaatgcaagacgtgtgctggcaatcgaatgtgttattgcattacaagcagcagagttaaaaggtgttgaaggattatcaccaaaaacacgtcgcaagtatgatgagtttcgaagtatcgtgccatccattacacatgatcgtcaatttcataaagatattgaagcggttgcacagtatttaaagcaatcaatttatcaaacgactgcatgtcactaaatcgacatgagtgatgtttgaaatcgttacttgaaaaagcaaatatagtttgctatattaaaaataacttaataagacattgttcgtaggacaagtaatatatagtgttcgatatcagagagcttgtggttagtgtgaacaagaatcaacatatatatgaatctacctacttaatttaaaagaacaatcggtgataaccgttattttagtgaagtgcaatttaggtttagtgtatctttataacttaaattgttaaatagggtggcaacgcgtagaccacgtcccttgtagggatgtggtctttttttattttctaaaaaataaagacgtacgtcattccataataaatgataattatttgggaaaggatgaaggttaatgttagacattagattattcagaaatgagcctgacacagttaagagcaaaattgaattacgtggagatgatccaaaagttgtagatgaaattttagaattggatgagcaacgacgtaaattaattagtgcaacagaagaaatgaaagcacgtcgtaataaagtaagcgaagaaatcgcattaaaaaaacgtaataaagaaaatgctgatgatgtgattgctgaaatgcgcacattaggtgacgatattaaagaaaaagatagtcaattaaatgaaattgataataaaatgacaggtatcctttgtcgtattccaaatttaataagtgatgatgtacctcaaggtgaatctgatgaagataacgttgaagttaaaaagtggggtacaccacgtgagttttcatttgaacccaaagcacattgggatattgtagaagaattgaaaatggctgattttgatcgtgcagcaaaagtttcaggtgcgcgttttgtatatttaacaaatgaaggtgcgcaattagagcgtgctttaatgaactatatgattacaaaacatacaacacaacatggttatacagaaatgatggtaccacagcttgtgaacgcagatacaatgtatggtacaggtcaattacctaaatttgaagaagatttatttaaagtagaaaaagaaggattatatacaattccaactgctgaagtaccattaacgaatttctaccgtaatgaaattattcaaccaggtgtacttcctgaaaaattcactggtcaatctgcatgtttccgtagtgaagcaggatcagcaggtagagatacaagaggattaattcgtttacatcaattcgataaagtggaaatggtacgttttgaacaacctgaagattcatggaatgctttagaagaaatgacaacaaacgcagaagcaattctagaagagttaggtttaccataccgtcgtgttattttatgtacaggtgatattggatttagtgcaagcaaaacatatgatttagaagtttggttaccaagctacaatgattataaagaaattagttcatgctcaaactgtacggatttccaagcgcgtcgtgctaacatccgcttcaagcgtgacaaagcagctaaaccagaattagcacatacattaaatggtagtggtttagcagttggacgtacatttgctgctattgttgaaaattaccaaaatgaagatggaacagtaacaattccagaagcattagtaccatttatgggtggtaaaacacaaatttcaaaaccagttaaataaaggctttagctacaagctttaaaaagtatatatctacgtatacttaaagcaagggcaagatactttaaataatattttaaaaagtggtgacgaagctgtcgccactttttttgtgctgtaaaaatataatagtgagccaatgcacataacaacaataaattaagtttgtggtttaatggggtgaacgcatttcattatagcaacaatacgggataattatgatgaactaaaacaatctaaaacgtaacaagtttgagcatcactaatataggaaaggaagcgataaaatactgatttcgttgatatgtagtatgagttatatcgatggagtagggtagggggaggggatgattataagggagtggtacatgaatcaatatcccagactcatcatcagatataaaaatttataaaattgatacttaaaaacaactacaaatccatagaaaatatggaggtagtcttaaataaaaaattgaaaattctcaaaaataaaaagttaatatgaagctgactaaagactccggaatgtctaacctcagacaaactgatgtctaatgttattgcttagggtatagaactgtattagactaggtatattattttttcgtaattatataaatataaagtggcaaaggaggtaattgagatgacaacacatttaagttttagacaaggcgtgcaagagtgtatcccaacattattgggttatgccggtgttggtatttcatttggtattgtggcttcgtctcaaaactttagtattttagaaattgtcttgttatgtcttgttatatatgccggtgctgcgcaatttattatgtgcgcgttgtttatagcaggtacacctatatcagcgattgtactaactgtatttatcgtaaattcaagaatgttccttttaagtatgtcgcttgcaccaaacttcaagacatatgggttttggaaccgtgttggattaggttcattagtaactgacgaaacgtttggcgtcgccattacaccttatttaaaaggagaagctatcaatgatcgttggatgcatggtcttaacatcacagcatatttattttgggcaatttcatgtgtagctggggctttatttggcgaatatatctcaaatccgcaaacgctagggttagattttgctatcacggctatgtttatctttttggccattgcgcaatttgaatcaattactaaatcgcgattaagaatttacatagtactcattattgccgtcatagtaatgatgttatcgctaagtatgtttatgccttcatatctagcaatattaattgcagccacaatttcagcagcgttaggagtgatgatggaacaatgataactcatatgaacatgttaatacttattttattgtgtggtatcgtaacgctattaattcgaattataccttttatcatgatttcaaaagtgcaattgcctgatgtcgtggttcgatggctatcatttatcccaatcacactatttacggcacttgtcattgacagcattattcaacagacgcctcatggtgaggggtatacattaaacatcccttacattatcgcgctcattccgacggttattttatctataatcacgcgtagtttaactattacaattattagtgggattgttatcatggcagcattacgatttttcttttaaaaataactgaaaatcattgaacagatatttaaacttaggtaaactgttagtaatcagaaaattctgatatacaaatcgtctatgttaagattgggaatcgtgtatacgtaagcgatttggctaacgcatgacaatgataacaacattttaaatgataaaagtaattcatcactgaatctcaactaacacataacaatttcatatttcttattgtgagaagttgagggacttggccctgtgatacttcagcaaccgactttatagcacggtgctaaaaccaacgagttactcgaatgataagtataaagacttcttacttttcaatagggtgagaagtttttttgtttaaggaggaaagaacaatgacaaattacacagtagatactttaaatttaggggaatttattacagaatctggggaagtcatagataacttgcgtttgagatatgagcatgtcggttatcatggacaaccattagttgtagtttgtcatgcattaactggcaatcatttaacatatggaacagatgattatccgggttggtggcgagaaattattgatgggggatatatacccattcacgattatcaatttttaacatttgatgttattggtagtcctttcggttcaagttcacctttaaacgaccctcattttcctaaaaaattaacattaagagatatagtcagagcgaatgaacgaggtatacaagcccttggttatgataagattaatattttaatagggggaagtcttggaggtatgcaagcaatggaactactctacaatcaacagtttgaagtagataaagccattatccttgctgcaacaagtcgaacatcatcttatagtagagctttcaatgaaattgcaaggcaagccattcatcttggtggtaaggaaggtctaagtattgcacgccaattaggttttttgacatatcgatcatcaaaaagttatgatgaacgttttacgccggatgaagtagtcgcataccaacaacatcaaggtaataaatttaaagaacattttgatttgaattgttatctgacactgctagatgtattggatagtcacaacattgaccgaggtcgcacagacgtaacgcatgtttttaaaaatttagaaacaaaagtgttaacgatggggttcatagatgatttgctatatccggatgatcaagttcgtgcattaggtgaacgttttaaatatcatcgtcatttcttcgtgcctgataatgttgggcatgatggattcctactaaactttagtacctgggcacctaacttatatcatttcttaaatttaaagcattttaagcgtaagtaataatatatattttcaaagaatgaagccactaaatcacagttatcatattcaaaaacatctagagtacatgagagtggaaatgtattgtaaatctaaatcaagcttgattgctatgtagtgggattaaataatcatgttgaaaatgaaagcacacaaaagcgattcaaatgagtatgttaattacttataaaacatgaaagttattattcaattaaatgaaatagaagcatacaatctataaattgttaattttcattaaagaggttaaaataatagctatagttaaaaatatgggagtggcttatgtgttttcaaaaatacaacctaaagcaacaataattgcaacgattgcgttggtatttgtcgctttagctttatatctagtgcctggtttaggactaatatttgcattatttgcaaccataccaggtatcgttttatggaataaatcaatacaatctttcgggattagtgcacttattacagtaattataacaactgttttaggtaatactttcgttttaagtgccatcatattagtcttaattgcaagtttaattattggtcaattgctcaaagaaagaacgtctaaagaaagaatattatacgtaacaacagtagcgatgagcttaatttcattaatcgcttttatgttactacaaacattcggaaggattccaccatcagcgagcatagtaaaacctttcaagcaaacattacatgaagcgattacgatgagcggtgccgatgcgaatatgacccaaatattagaagaagggtttagacaagcgaccgttcaattaccaggtttcatcattatcattacatttttaatcgtcttaattaacttaatcgttacatttccgattttacgaaaatttaaaatcgctacacctgtatttaagccacttttcgcgtggcaaatgagcggtattttattatggatatacattattgttatcatatgtttattatttacaggtcaaccgagtgtgttccagagcattcttttaaacttccaacttgtgttatcattagtaatgtatattcaaggtttaagtgttattcatttctttggtaaagcgaaaggtttgccgaatgcagtaacgattttactattggttatcggtacaatactgacacctacgacacatattgtaggactacttggtgttatcgatttaagtttgaatttgaagcgaatcatgaaaaataattctaaaaagtgaatagaggtggaataatgaatcggcagtccactaagaaagctttactaataccatttgtcatcatgatcatcacagcaattgttttaatgggtgtatggtttatctttaatagtcttatagcactaattgcatctatcgttcttgtcgtgatgattattgttagcatcattttattcagacaagctttaatgaaaatggatagttatgtagatggtttgagtgctcaaatttcaacaacaaataataaagcaatcaaacatttaccaattggtatcattgttttagatgaaaatgatcacatcgaatgggttaaccaatttatgacagatcatatggaagcgaatgtcatttctgaatctgtaaatgaagtatttccaaacattttaaagcaattagatagagtgaaatccgttgaaatagaatataatcagtatcatttccaagtacgttattctgagaatgatcactgcctctatttctttgatataactgaacaagtacaaacaaatgaactatatgaaaattctaaaccaatcattgcgacattatttttagataactacgatgagattacgcaaaatatgaatgatacgcagcgttcggaaatcaactcaatggtaacgcgtgtcattagtcgatgggcaactgagtataatatatttttcaaaagatacagttccgatcaattcgtagcctatttaaatcaaaaaatattagctgacttagaagaatctaaatttgatatcttgagtcaattacgtgaaaaaagtgttggttatcgtgcccaattaacattaagtatcggtgttggtgaaggtactgaaaatttaatcgacttaggtgaattatcacaatcaggcctagacttagcattaggacgcggtggcgaccaagttgcaattaaaagtattaatggtaatgtgcgtttctatggcggtaagactgacccgatggagaaacgtactcgtgtaagagcacgtgtgatctcacatgcgttaaaagatatccttgcagagggtgacaaagtcattatcatgggacataaacgtcctgacttagatgcaattggtgcagcaatcggtgtgtctagatttgcaatgatgaataatttagaagcatacatcgtattaaatgagactgacattgatccaacattacgacgcgtgatgaacgaaatagataaaaagccagagttaagagagcgatttattacatcagatgatgcttgggatatgatgacatctaagacaaccgtagtgattgttgatacgcataaaccggaactggttttagatgaaaatgtcttaaataaagcaaaccgtaaagttgttatcgatcatcatagacgtggtgaaagcttcatctctaatccattgttgatatatatggaaccatacgcaagttcgacagctgaattggtaacagagttactggaatatcaaccaacagaacaacgtttaacacgtcttgaatcaacagtgatgtatgcaggtattattgtagatacaagaaactttacattacgaacaggatcaagaacattcgatgcagcgagttatttacgtgcacatggtgcagatacgattttaacgcaacatttcttaaaagatgatgtggatacttacattaatcgatctgaattaattcgaactgtaaaagttgaagataatggcatagccattgcgcatggttcagacgataaaatttatcatccagtaacagttgcacaagcagcagatgaactgttaagtttagaaggtattgaagcatcatatgttgttgcgagacgtgaagataatctgattggtatatctgcgcgttcactcggttcagtaaatgtccagttaacaatggaagcacttggtggcggtggacatttaaccaatgcggcaacacaacttaaaggtgtgacagtcgaagaggcgatagcacaattacaacaagcaattacagaacaattaagtaggagtgaagatgcatgaaagtaatttttacacaagatgttaaaggtaaaggtaaaggtaaaaaaggtgaagttaaagaagtaccagtaggttatgcaaataacttcttattgaaaaagaattatgctgtagaagcaacaccaggtaaccttaaacaattagagttacagaaaaaacgtgcaaaacaagaacgccaacaagaaattgaagatgctaaagcattaaaagaaacgttatcaaacattgaagttgaagtatcagcaaaaactggtgaaggtggtaaattgtttgggtcagtaagtacaaaacaaattgccgaagcactaaaagcacaacatgatattaaaattgataaacgtaaaatggatttaccaaatggaattcattccctaggatatacgaatgtacctgttaaattagataaagaagttgaaggtacaattcgcgtacacacagttgaacaataaagttggattgaaataagaggtgtaaccattcatggatagaatgtatgagcaaaatcaaatgccgcataacaatgaagctgaacagtctgtcttaggttcaattattatagatccagaattgattaatactactcaggaagttttgcttcctgagtcgttttataggggtgcccatcaacatattttccgtgcaatgatgcacttaaatgaagataataaagaaattgatgttgtaacattgatggatcaattatcgacggaaggtacgttgaatgaagcgggtggcccgcaatatcttgcagagttatctacaaatgtaccaacgacgcgaaatgttcagtattatactgatatcgtttctaagcatgcattaaaacgtagattgattcaaactgcagatagtattgccaatgatggatataatgatgaacttgaactagatgcgattttaagtgatgcagaacgtcgaattttagagctatcatcttctcgtgaaagcgatggctttaaagacattcgagacgtcttaggacaagtgtatgaaacagctgaagagcttgatcaaaatagtggtcaaacaccaggtatacctacaggatatcgagatttagaccaaatgacagcagggttcaaccgaaatgatttaattatccttgcagcgcgtccatctgtaggtaagactgcgttcgcacttaatattgcacaaaaagttgcaacgcatgaagatatgtatacagttggtattttctcgctagagatgggtgctgatcagttagccacacgtatgatttgtagttctggaaatgttgactcaaaccgcttaagaacgggtactatgactgaggaagattggagtcgttttactatagcggtaggtaaattatcacgtacgaagatttttattgatgatacaccgggtattcgaattaatgatttacgttctaaatgtcgtcgattaaagcaagaacatggcttagacatgattgtgattgactacttacagttgattcaaggtagtggttcacgtgcgtccgataacagacaacaggaagtttctgaaatctctcgtacattaaaagcattagcccgtgaattaaaatgtccagttatcgcattaagtcagttatctcgtggtgttgaacaacgacaagataaacgtccaatgatgagtgatattcgtgaatctggttcgattgagcaagatgccgatatcgttgcattcttataccgtgatgattactataaccgtggcggcgatgaagatgatgacgatgatggtggtttcgagccacaaacgaatgatgaaaacggtgaaattgaaattatcattgctaagcaacgtaacggtccaacaggcacagttaagttacattttatgaaacaatataataaatttaccgatatcgattatgcacatgcagatatgatgtaaaaaagtttttccgtacaataatcattaagatgataaaattgtacggtttttattttgttctgaacgggttgatatatgttaagtttgtgtattgaaagtgataaattagtactgtcaacgcctctgttaaagggtttttaggacgttgaaaacgatttgttaaaatgatttttcttttaaaaaggccgaaaatcaatgttcgatttttatttgcattatggtctcgatattggtagaatatcaaatggttaaatgagaaaaacttggaggtgctcacatgtcatcaatcgtagtagttgggacacaatggggagacgaaggaaaaggaaaaataacggatttcttggcagaacagtcagatgttatcgcgcgtttttcaggtggtaataatgcaggccataccattcaatttggcggagaaacatataaattacatttagtaccatctggtatcttttacaaagacaaattagcggtaatcggtaacggagtcgttgttgatccagttgcactattgaaagaattagacggattaaatgaacgtggcattcctacaagtaatttacgtatatctaatcgtgcgcaagtgattttaccatatcacttagcacaagatgaatatgaagaacgtttacgtggtgacaataagattggtacaactaaaaaaggtatcggtccagcatatgtagacaaagttcaacgtatcggtattcgtatggcagatttacttgaaaaagaaacattcgaaagattattaaaatcaaacattgaatataaacaagcatatttcaaaggtatgtttaacgaaacatgtccatcatttgatgatatctttgaagaatattatgcagcaggtcaacgtctaaaagaatttgtaacagacacatcaaaaatcttagacgatgcatttgtagcagatgaaaaggtacttttcgaaggtgcgcaaggtgtaatgttagatatcgaccatggtacatatccattcgttacatcaagtaatccaattgcaggtaacgttactgttggtacaggtgtaggtcctacattcgtttcaaaggtaattggtgtatgtaaagcttatacatcacgtgttggtgatggtccattccctactgaattattcgatgaagatggacatcatattagagaggttggtcgtgaatacggtacaacaacaggacgtccacgtcgtgtaggttggtttgattcagttgtattacgtcactctcgtcgtgtaagtggtattacagatttatctattaactcaatcgatgttttaacaggcctagacacagtgaaaatctgtacagcttatgaattagacggtaaagaaattactgagtacccagcaaacttagatcaattaaaacgttgtaaaccaatctttgaagagttaccaggttggacagaagacgtaacaaatgtgcgtactttagaagaattacctgaaaatgcacgtaaatatttagagcgtatttcagaattatgtaatgtacaaatttctatcttctcagttggtccagatagagaacaaacaaacctattaaaagaattgtggtagaactttatataagtcatacacaatgattataaatacatgagccttctatctttattggtaggaggcttttgttatgcttgcttctgtatcgattcgattatttagataaaaaatactaacgtaaaggcgatatttgctagtcataatttagaagattagatgatatttaacgaaaattaagatgaaatacttgaatgtaagaagtctgatgtcgaaaatagctattaaaatagagtagacgtaagtgtaaatgaaagcacctaaaatagaaaaatttcaaaaatagcgtaattattataataaatagactgccaataaaatgcaatttttcacttataacattcttcaaaaaataatagcaaaattatgtaaaaaatatcttgtcatggcaagattggctgtgctataatctatcttgtgcttaagaacggctccttggtcaagcggttaagacaccgccctttcacggcggtaacacgggttcgagtcccgtaggagtcaccattttttaggtctcgtagtgtagcggttaacacgcctgcctgtcacgcaggagatcgcgggttcgattcccgtcgagaccgtacaaatgcctatccaagaggataggcatttttttgcgtttaatattatattaataaaagatatatggacgaatgataatcatattgatttatctgttcgtccattttctttaaaatgtatgaacctcaagtaacttagtggttggatatgaaagataaacgtagacaataaaatctttattagacgtacaaacatatgctactgtcaacatatttcttcgttgtgatatgccaccagtcctccataacatcaattgttaaagtaacgaataacgaataatgatatttattttctgagcaatgacgtgcaactagaagttgccattatcctaattttattattggaatagagacctcatcattgtgttaaatatcattgtcacaatccgccgtgagaaactaataaaaaatagtaatatataagtttatattggaaaatagaattaatagcttataaatggtaaattatataataggttactatacgttataagacggaaaatgcgcacaataacaaaaatagtaagcgacatcctgtgattttttacacaaacataaacgataaagaacaaaaaatgataaaataatattaatgatttaagaaaagaggtttatgcaaatggctagaaaagttgttgtagttgatgatgaaaaaccgattgctgatattttagaatttaacttaaaaaaagaaggatacgatgtgtactgtgcatacgatggtaatgatgcagtcgacttaatttatgaagaagaaccagacatcgtattactagatatcatgttacctggtcgtgatggtatggaagtatgtcgtgaagtgcgcaaaaaatacgaaatgccaataataatgcttactgctaaagattcagaaattgataaagtgcttggtttagaactaggtgcagatgactatgtaacgaaaccgtttagtacgcgtgaattaatcgcacgtgtgaaagcgaacttacgtcgtcattactcacaaccagcacaagacactggaaatgtaacgaatgaaatcacaattaaagatattgtgatttatccagacgcatattctattaaaaaacgtggcgaagatattgaattaacacatcgtgaatttgaattgttccattatttatcaaaacatatgggacaagtaatgacacgtgaacatttattacaaacagtatggggctatgattactttggcgatgtacgtacggtcgatgtaacgattcgtcgtttacgtgaaaagattgaagatgatccgtcacatcctgaatatattgtgacgcgtagaggcgttggatatttcctccaacaacatgagtagaggtcgaaacgaatgaagtggctaaaacaactacaatcccttcatactaaacttgtaattgtttatgtattactgattatcattggtatgcaaattatcgggttatattttacaaataaccttgaaaaagagctgcttgataattttaagaagaatattacgcagtacgcgaaacaattagaaattagtattgaaaaagtatatgacgaaaagggctccgtaaatgcacaaaaagatattcaaaatttattaagtgagtatgccaaccgtcaagaaattggagaaattcgttttatagataaagaccaaattattattgcgacgacgaagcagtctaaccgtagtctaatcaatcaaaaagcgaatgatagttctgtccaaaaagcactatcactaggacaatcaaacgatcatttaattttaaaagattatggcggtggtaaggaccgtgtctgggtatataatatcccagttaaagtcgataaaaaggtaattggtaatatttatatcgaatcaaaaattaatgacgtttataaccaattaaataatataaatcaaatattcattgttggtacagctatttcattattaatcacagtcatcctaggattctttatagcgcgaacgattaccaaaccaatcaccgatatgcgtaaccagacggtcgaaatgtccagaggtaactatacgcaacgtgtgaagatttatggtaatgatgaaattggcgaattagctttagcatttaataacttgtctaaacgtgtacaagaagcgcaggctaatactgaaagtgagaaacgtagactggactcagttatcacccatatgagtgatggtattattgcaacagaccgccgtggacgtattcgtatcgtcaatgatatggcactcaagatgcttggtatggcgaaagaagacatcatcggatattacatgttaagtgtattaagtcttgaagatgaatttaaactggaagaaattcaagagaataatgatagtttcttattagatttaaatgaagaagaaggtctaatcgcacgtgttaactttagtacgattgtgcaggaaacaggatttgtaactggttatatcgctgtgttacatgacgtaactgaacaacaacaagttgaacgtgagcgtcgtgaatttgttgccaatgtatcacatgagttacgtacacctttaacttctatgaatagttacattgaagcacttgaagaaggtgcatggaaagatgaggaacttgcgccacaatttttatctgttacccgtgaagaaacagaacgaatgattcgactggtcaatgacttgctacagttatctaaaatggataatgagtctgatcaaatcaacaaagaaattatcgactttaacatgttcattaataaaattattaatcgacatgaaatgtctgcgaaagatacaacatttattcgagatattccgaaaaagacgattttcacagaatttgatcctgataaaatgacgcaagtatttgataatgtcattacaaatgcgatgaaatattctagaggcgataaacgtgtcgagttccacgtgaaacaaaatccactttataatcgaatgacgattcgtattaaagataatggcattggtattcctatcaataaagtcgataagatgttcgaccgattctatcgtgtagataaggcacgtacgcgtaaaatgggtggtactggattaggactagccatttcgaaagagattgtggaagcgcacaatggtcgtatttgggcaaacagtgtagaaggtcaaggtacatctatctttatcacacttccatgtgaagtcattgaagacggtgattgggatgaataataaggagcatattaaatctgtcattttagcactactcgtcttgatgagtgtcgtattgacatatatggtatggaacttttctcctgatattgcaaatgtcgacaatacagatagtaagaagagtgaaacgaaacctttaacgacacctatgacagccaaaatggatacaactattacgccatttcagattattcattcgaaaaatgatcatccagaaggaacgattgcgacggtatctaatgtgaataaactgacgaaacctttgaaaaataaagaagtgaagtccgtggaacatgttcgtcgtgatcataacttgatgattcctgatttgaacagtgattttatattattcgattttacgtatgatttaccgttatcaacatatcttggtcaagtactgaacatgaatgcgaaagtaccaaatcatttcaatttcaatcgtttggtcatagatcatgatgctgatgataatatcgtgctttatgctataagcaaagatcgccacgattacgtaaaattaacaactacaacgaaaaatgatcattttttagatgcattagcagcagtgaaaaaagatatgcaaccatacacagatatcatcacaaacaaagatacaattgatcgtacgacgcatgtttttgcaccaagtaaacctgaaaagttaaaaacatatcgcatggtatttaacacgattagtgttgagaaaatgaatgctatactatttgacgattcaaccatcgttcgtagttcaaagagtggtgttacaacctacaacaataatacaggtgtcgcaaactataacgataaaaatgaaaaatatcattataaaaacctgtccgaagatgaagcgagttccagcaaaatggaagaaacgattccaggaacctttgattttattaatggtcatggtggtttcttaaacgaagactttagattgtttagtacgaataatcagtcaggcgagttaacatatcaacgtttccttaatggttatccaacgtttaataaagaaggttctaatcaaattcaagtcacttggggtgaaaaaggcgtctttgactatcgtcgttcgttattacgcaccgacgttgttttaaatagtgaggataataaatcgttgccgaaattagagtctgtacgttcaagcttagcgaacaatagtgatattaattttgaaaaagtaacaaacatcgctatcggttacgaaatgcaggataattcagatcataatcacattgaagtgcagattaacagtgaactcgtaccgcgttggtatgtagaatatgatggcgaatggtatgtttataacgatgggaggcttgaataaatgaactggaaactgacaaagacacttttcattttcgtgtttattcttgtcaacatcgtgttagtatcgatttatgttaataaagtcaatcgctcacacattaatgaagtcgagagtaacaatgaagttaattttcagcaagaagaaattaaagtaccgactagtatattgaataaatcagttaaaggtataaaattagagcaaattacagggcgatcaaaagactttagttctaaagctaaaggcgattcggatttgaccacatcagatggtggaaaattattgaatgcgaacattagtcaatcggtaaaggtcagtgacaataacttaaaagatttgaaagattatgttaacaagcgcgtatttaaaggtgctgaatatcaattaagcgagattagttcagattctgtaaaatatgaacaaacgtatgatgattttccgattttaaataacagtaaagcgatgttaaactttaatatagaagataacaaagcgactagttataaacaatcaatgatggatgacattaagcccacagatggtgcagataagaagcatcaagtgattggtgtgagaaaagcaatcgaggcattatattataatcgttacttgaaaaaaggtgatgaagtcattaatgctagactcggttactactcagtcgtgaatgaaacgaatgttcaattgttacaaccaaactgggaaattaaagtgaagcatgacggtaaggataaaacgaatacttactatgtcgaagcgacaaataataaccctaaaattattaatcattaatatgaatcgtaataagctagcattgcaagctcatcatatgtgagaagcggtgctagcttttttgctggtacggtttattatggctgatgtttttgcgtctccaacgtgcgcatttattcatattttaagtagaaccgcattgtaaaattagtgtaactgttattttaaaaactttagtatttgtctaatcattgttataataattaagaaattcattgcacgtgattatcaaaatttaaatataagaaaccggtcgatgaactaaagttacataataggaaaggtatacaaaacagctaatatactgatagtttctgtagggaaaatcgtatatttgcactgatgtatattgcagtcatatagagagattgactgtttaaagagaaaggatgagccgcttgatacgcatgagtgtattagcaagtggtagtacaggtaacgccacttttgtagaaaatgaaaaaggtagtctattagttgatgttggtttgactggaaagaaaatggaagaattgtttagtcaaattgaccgtaatattcaagatttaaatggtattttagtaacccatgaacatattgatcatattaaaggattaggtgttttggcgcgtaaatatcaattgccaatttatgcgaatgaaaaaacttggcaggcaattgaaaagaaagatagtcgcatccctatggatcagaaattcatttttaatccttatgaaacaaaatctattgcaggtttcgatgttgaatcgtttaacgtgtcacatgatgcaatagatccgcaattttatattttccataataactataagaagtttacgattttaacggatacgggttacgtgtctgatcgtatgaaaggtatgatacgtggcagcgatgcgtttatttttgagagtaatcatgacgtcgatatgttgagaatgtgtcgttatccatggaagacgaaacaacgtattttaggcgatatgggtcatgtatctaatgaggatgcggctcatgcaatgacagacgtgattacaggtaacacgaaacgtatttacctatcgcatttatcacaagacaataacatgaaagatttggcgcgtatgagtgttggccaagtattgaacgaacacgatattgatacggaaaaagaagtattgctatgtgatacggataaagctattccaacgccaatatatacaatataaatgagagtcatccgataaagttccgcattgctgtgagacgactttatcgggtgcttttttatgttgttggtgggaaatggctgttgttgagttgaatcggcttgattgaaatgtgtaaaataattcgatattaaatgtaatttataaataatttacataaaatcaatcattttaatataaggattatgataatatattggtgtatgacagttaatggagggaacgaaatgaaagctttattacttaaaacaagtgtatggctcgttttgctttttagtgtaatgggattatggcaagtctcgaacgcggctgagcagcatacaccaatgaaagcacatgcagtaacaacgatagacaaagcaacaacagataagcaacaagtaccgccaacaaaggaagcggctcatcattctggcaaagaagcggcaaccaacgtatcagcatcagcgcagggaacagctgatgatacaaacagcaaagtaacatccaacgcaccatctaacaaaccatctacagtagtttcaacaaaagtaaacgaaacacgcgacgtagatacacaacaagcctcaacacaaaaaccaactcacacagcaacgttcaaattatcaaatgctaaaacagcatcactttcaccacgaatgtttgctgctaatgcaccacaaacaacaacacataaaatattacatacaaatgatatccatggccgactagccgaagaaaaagggcgtgtcatcggtatggctaaattaaaaacagtaaaagaacaagaaaagcctgatttaatgttagacgcaggagacgccttccaaggtttaccactttcaaaccagtctaaaggtgaagaaatggctaaagcaatgaatgcagtaggttatgatgctatggcagtcggtaaccatgaatttgactttggatacgatcagttgaaaaagttagagggtatgttagacttcccgatgctaagtactaacgtttataaagatggaaaacgcgcgtttaagccttcaacgattgtaacaaaaaatggtattcgttatggaattattggtgtaacgacaccagaaacaaagacgaaaacaagacctgaaggcattaaaggcgttgaatttagagatccattacaaagtgtgacagcggaaatgatgcgtatttataaagacgtagatacatttgttgttatatcacatttaggaattgatccttcaacacaagaaacatggcgtggtgattacttagtgaaacaattaagtcaaaatccacaattgaagaaacgtattacagttattgatggtcattcacatacagtacttcaaaatggtcaaatttataacaatgatgcattggcacaaacaggtacagcacttgcgaatatcggtaagattacatttaattatcgcaatggagaggtatcgaatattaaaccgtcattgattaatgttaaagacgttgaaaatgtaacaccgaacaaagcattagctgaacaaattaatcaagctgatcaaacatttagagcacaaactgcagaggtaattattccaaacaataccattgatttcaaaggagaaagagatgacgttagaacgcgtgaaacaaatttaggaaacgcgattgcagatgctatggaagcgtatggcgttaagaatttctctaaaaagactgactttgccgtgacaaatggtggaggtattcgtgcctctatcgcaaaaggtaaggtgacacgctatgatttaatctcagtattaccatttggaaatacgattgcgcaaattgatgtaaaaggttcagacgtctggacggctttcgaacatagtttaggcgcaccaacaacacaaaaggacggtaagacagtgttaacagcgaatggcggtttactacatatctctgattcaatccgtgtttactatgatataaataaaccgtctggcaaacgaattaatgctattcaaattttaaataaagagacaggtaagtttgaaaatattgatttaaaacgtgtatatcacgtaacgatgaatgacttcacagcatcaggtggcgacggatatagtatgttcggtggtcctagagaagaaggtatttcattagatcaagtactagcaagttatttaaaaacagctaacttagctaagtatgatacgacagaaccacaacgtatgttattaggtaaaccagcagtaagtgaacaaccagctaaaggacaacaaggtagcaaaggtagtaagtctggtaaagatacacaaccaattggtgacgacaaagtgatggatccagcgaaaaaaccagctccaggtaaagttgtattgttgctagcgcatagaggaactgttagtagcggtacagaaggttctggtcgcacaatagaaggagctactgtatcaagcaagagtgggaaacaattggctagaatgtcagtgcctaaaggtagcgcgcatgagaaacagttaccaaaaactggaactaatcaaagttcaagcccagaagcgatgtttgtattattagcaggtataggtttaatcgcgactgtacgacgtagaaaagctagctaaaatatattgaaaataatactactgtatttcttaaataagaggtacggtagtgtttttttatgaaaaaaagcgataaccgttgataaatatgggatataaaaacgaggataagtaataagacatcaaggtgtttatccacagaaatggggatagttatccagaattgtgtacaatttaaagagaaatacccacaatgcccacagagttatccacaaatacacaggttatacactaaaaatcgggcataaatgtcaggaaaatatcaaaaactgcaaaaaatattggtataataagagggaacagtgtgaacaagttaataacttgtggataactggaaagttgataacaatttggaggaccaaacgacatgaaaatcaccattttagctgtagggaaactaaaagagaaatattggaagcaagccatagcagaatatgaaaaacgtttaggcccatacaccaagatagacatcatagaagttccagacgaaaaagcaccagaaaatatgagtgacaaagaaattgagcaagtaaaagaaaaagaaggccaacgaatactagccaaaatcaaaccacaatccacagtcattacattagaaatacaaggaaagatgctatcttccgaaggattggcccaaaaattgaaccaacgcatgacccaagggcaaagcgactttgttttcgtcattggcggatcaaacggcctgcacaaggacgtcttacaacgcagtaactacgcactatcattcagcaaaatgacattcccacatcaaatgatgcgggttgtgttaattgaacaagtgtacagagcatttaagattatgcgaggagaggcgtatcataagtaaaactaaaaaattctgtatgaggagataataatttggagggtgttaaatggtggacattaaatccacgttcattcaatatataagatatatcacgataattgcgcatataacttaagtagtagctaacagttgaaattaggccctatcaaattggtttatatctaaaatgattaatatagaatgcttctttttgtccttattaaattataaaagtaactttgcaatagaaacagttatttcataatcaacagtcattgacgtagctaagtaatgataaataatcataaataaaattacagatattgacaaaaaatagtaaatataccaatgaagtttcaaaagaacaattccaagaaattgagaatgtaaataataaggtcaaagaattttattaagatttgaaagagtatcaatcaagaaagatgtagttttttaataaactatttggaaaataattatcataatttaaaaactgacaatttgcgagactcataaaatgtaataatggaaatagatgtaaaatataattaaggggtgtaatatgaagattaatatttataaatctatttataattttcaggaaacaaatacaaattttttagagaatctagaatctttaaatgatgacaattatgaactgcttaatgataaagaacttgttagtgattcaaatgaattaaaattaattagtaaagtttatatacgtaaaaaagacaaaaaactattagattggcaattattaataaagaatgtatacctagatactgaagaagatgacaatttattttcagaatccggtcatcattttgatgcaatattatttctcaaagaagatacaacattacaaaataatgtatatattataccttttggacaagcatatcatgatataaataatttgattgattatgacttcggaattgattttgcagaaagagcaatcaaaaatgaagacatagttaataaaaatgttaatttttttcaacaaaacaggcttaaagagattgttaattatagaaggaatagtgtagattacgttagaccttcagaatcttatatatcagtccaaggacatccacagaatcctcaaatttttggaaaaacaatgacttgtggtacaagtatttcattgcgtgtaccgaatagaaagcagcaattcatagataaaattagtgtgataatcaaagaaataaacgctattattaatcttcctcaaaaaattagtgaatttcctagaatagtaactttaaaagacttgaataaaatagaagtattagatactttattgctaaaaaaactatcgaattcttcaactacagaaaatatatctatagatatatcaagatttttagaactaagtaatatgatactcttgttagatgatatgctcgacgtcaatatatatataaattcttttaaaaataatacattagagacatttgatgcgactgatcctgaagttgattacatcactgaaataggagattacttattaaaatatgacgttaattctataaatgatgtcagaattgaagtgatagataatttggggcattcaaataatatgctactaaaaacgatactacatgcagaagttgaaatggaagatggaaagaaatatttattacaaaatgggaaatggggttattttaatagagaattttttgaccttttgaatgatcatttgaatgagatagaaattaggtataacacactaactcccacaggtttagtatttaaagaaggagaagaaggatatataaaagaaatagtaggaagattgccagaagaatatttaatgttacataaaaaattcataaaaccaataaataagaattttatagtaaaaggaaatggaatagagttggcagacttatacaatattaaaaacaaagagcttttcacgattaaaagaggaattaatacatctttatctctttatagtctagaacagaatataatagcaattaacgccttaaaatatccagaatcatataattttgaagaattaatagaagctattcctgataactcggaaaatatatttaatgatatacaacggagtacaaattttagtatagtatggattttaccgatatcatctattgataatatgcccataaaagatatggttcatactagtaacgtaataaataaaaactttcaattaactaatttaggttcagtattacttaaaaataaattagtagagtggtctctctatttaaaagatcaaagaattaatccaattatttatatggaaacgccaactgaagatagaaattaaacttttattttaaatcaccctagttcatacctaaaagactttcacacaaacaaaggaggaaacttaaattcctcctttcccttattactcatactataattcaattttaacgtcttcgtccatttgggcttcaaattcatctagtagtgctcgtacttctgcaattgattgtgtgttcatcaattgatggcgaagttcgctagcgcctcttatgccacgcacatagattttaaagaatctacgcaaactcttgaattgtcgtatttcatctttctcatatttgttaaacaatgatagatgcaatctcaacaaatctaatagttctttgcttgtgtgttcgcgtggttctttttcaaaagtgaatggattgtggaaaatgcctctaccaatcatgatgccatcaataccatatttttctgcaagttcaagtcctgtttttctatcgggaatatcatcgttaattgttaacaatgtgtttggtgcaatttcgtcacgtaaatttttaatagcttcgattaattcccaatgtgcatctactttactcatgcgtttgataaaaacttaaataatattaattcggtcatcagtggcgttaaatcttttatcatttttagttatagttgataaatttatatttataagcatatatggatatttcatcaaaaatttttatttatataaatccgaactgcatacatatttgtttaaataagaggtattatttttcgggaaattgctgtctgagttaaaaggattagttttataaaatgagttgaactatagcaaaaacgattaaaatactgataatccatttttgtattatgttagggacttttttacttaattttaaccctattggagcaaatataatactccctattataaggaataaggcgtcatataaagggatataaccttgaataagtttgatgacaaaagcaccaattgaagatataaaagcaattactatactattagcgactacagtattcattggtaatttgaataaaaccaataatataggaataataatgaaggcaccacctgcacctactatacctgaaataataccaatgaaaaggccaatgataactaataaatatttattaaatgaagacttttcggaactaggtttcactttaataaacattaatgttaatgcaagtaaagcaataatgatatataccgtatttacaaatgtagcatcaaataaatttgctagaaatgcacctaacatactccctataatcatgccgccacccatataaagaactaattgtggcgagaactctgttttttttcgagcttttaatgagccacttaatgtactgaaaaagacttggctagaagtaagacctgatgcgatatatgcgctatatgcaggggctccgaataatggtggtaataataaaatagctggataaataatgatagcaccacctacgcctactagaccagatatgaacccaccgaataccccaatgagtaacatgataactatattaacaatatccattacttacttttcaccaataagtttacagcttcattaattaactcttgggagctttcttcatcatccgcagctgcttttacacattctattaaattctcactaataatgatacccatcaagcgttggagtgaactctttgatgcacttatttgtgtaatgacatctttacagtcttttccttcctccatcattttaataattccatttagttgcccttgtattctattaatacgattaatcatttttttatcataattcatagtcatacctccacttttaattgaataaaaatatattaatagataaacacaaatgtgtcaaatacccctagaggtatttgacaagttccatccaactgtttaaaatacccctacaggtatttttagggaggttattatgaaacaatacggagaaaagtttatcgatgaatttagtaaagcagaattggaaaaactagccaagcaagggcaattaattgacgttagaacagaagaggagtatgcattaggacatatcaatggttccatacttcatcctgttgatgagattgagtcattcaataaagaaaaaaataaaacctattatgtaatctgtagaagtggtaacagaagtgctaatgctagtaaatatttagctaaacaaggttataacgttataaatcttgatggtggttataaagcttatgaagaagaaaacgatagttatgatacacaagaagaatataaaagtatagaaattaaagcagatcgtaaacaatttaactatcgtggtcttcaatgtccagggccaattgtaaaaattagtcaagaaatgaagaatattgaagtaggtgaccaaattgaagtcaaagtcacagaccctggattccctagtgacattaaaagttgggtgaaacaaacaaggcatactttagttaagcttgatgaaaataacaatggaattaatgcgattattcaaaaagaaaaagcaaaagatttagatataaattattctgctaaaggtactacaattgtattatttagtggagaattagacaaagctgtagcagcgttgattattgcaaatggtgctagagctgctggaaaagatgtaactatcttctttactttttgggggcttaatgcattaaaaaaagtgcaaacagttaatgttaaaaagcaaggtattgcaaaaatgtttgatttaatgttgcccaaaaagaatatacgaatgcctctttccaaaatgaatatgtttggtttaggaaatatgatgatgcgctacgtaatgaaaaagaaaaatgttgattcattaccaacacttatcaatcaagctattgagcaaaatatcaaattaatcgcttgtacgatgagtatggatgtcatgggtattcagaaagaagaacttagagatgaagttgagtacggtggtgtaggcacttatattggtgctactgaaaatgcgaatcataatttatttatctaattaaatctattaataaaaggagttgttatcatgttttttaaacagttttacgataatcatttatctcaagcatcatatttagtgggttgtcaacgtacaggagaggcaataataatagaccctgttcgtgatttatcgaaatatatagaagttgcagattctgaaggtttaacaattacacaagctacagaaacacatattcatgctgattttgcttcaggaattcgtgatgtggctaaacgcttaaatgcaaatatatatgtgtctggcgaaggtgaagatgcattagggtataaaaatatgccatcaaaaacacaatttgttaaacatggagatatcattcaagtaggcaatgttaaattagaagttctgcatactccaggacacacgcctgaaagtattagctttttactcactgatttaggtggtggttcaagtgttccgatgggattatttagtggtgactttatttttgttggtgatataggtagacctgatttattagaaaaatctgttcaaataaagggttctacagaaattagcgcgaaacaaatgtatgagtccgttcaaaatattaaaaatttaccagactatgttcaaatctggccgggtcatggtgctggaagcccttgtggtaaagcattaggtgccatacctatatctacaataggttatgagaaaattaataactgggcatttaatgaaattgatgagactaaatttattgaatcattaacatcaaatcaaccagcaccaccgcatcattttgcacaaatgaaacaagttaatcagtttggtatgaatttatatcaatcatatgatgtttatcctagtttagataataagagagtagcatttgatcttcgtagcaaagaggcctttcacggtggccacacaaaaggaacaatcaatataccatacaacaaaaactttattaatcaaattggttggtacttagattttgaaaaagatatagatgtaattggagataaatctactgttgagaaagcgaaacacactttacaattaattgggtttgataaggtagcaggctatcgtttgccaaaatcaggcatttcaacccagtccgttcatagcgctgatatgacaggtaaagaagaacatgtattagacgtacgtaatgatgaagagtggaataatggacacttagatcaagcagttaatattccgcatggtaaattattaaatgaaaatattccttttaataaagaggataaaatatatgtacattgtcagtcaggtgttagaagttcaattgcagtgggtatattggaaagcaaaggttttgaaaatgtggtgaatattagagaaggctatcaagattttccagaatcattaaaataatttaaggatgtggaaaaaatgaataagcattatcaaattgttattattggtggcggtacagcaggtgttaccgtagcatcaagactattaagaaaaaatcaaaacttaaaagagaaaatagcaattatagatccagcagaccatcattactatcaaccattatggacgttggttggtgcaggggtatctagtttgaaaagttctcgtaaagatatggaaagtgttatacctgaaggtgctaactggataaaacaggctgtttcaagttttcaacctgaaaataatagcgttattttaggagataatacagtcgtttattatgattttttagtagtagctccaggattacagattaattggtcttcaattaaaggactaaaagaaaatataggtaaaaatggtgtttgctctaactattcacctgactatgttaacgaaacttggaaccaaatttctaattttaaacaaggaaatgccatttttacgcatccaaacactcctataaagtgtggaggtgcgcctatgaaaattatgtatttagctgaagattattttaggaaacataaaatccgttctaacgctaatgtgatatatgcaacgccaaaagatgctttatttgacgtaggaaaatataataaagaattagaaaggattgttgaagaaagaaatataacagtcaattataattataaccttgttgaaatcgacggtgacaaaaaagtggctacattcgaacatatcaaagcatacgatagaaaaacaataagttatgatatgttacatgtaacaccacctatgggtcccttagatgtagtaaaagaaagtacactttcagatagtgagggttgggtagatgttaacccaaccacattacagcataaaagctactctaatgtatttgcacttggtgatgcttcaaatgtacctacttcaaaaacaggcgcagctattcgtaagcaagcacctatcgtcgctaataatttattgcaagtgatgaataatcaaatgttaacgcatcattatgatggttatacttcatgccctattgttactggatataataggttaatacttgcagagtttgattataataaaaatactaaagaaacaatgccgtttaatcaggccaaagaacgtagaagtatgtatatatttaagaaagatttattacctaaaatgtattggtacggcatgctaaaaggattaatataataaagtacagaaaacaataaatttttaatgaaaaatcttttactataaaagattaagtatttaaatgacgtgtcagtgttgtgtttatatgtcgtgaatttttagctctaaatagtataagattgaaaaagttgttactgttttaaatgatcacgatgaagtcattcaataagaatgattatgaaaatagaaacagcagtaagatattttctaattgaaaatcatctcactgctgttttttaaaggtttatacctcatcctctaaattatttaaaaataattaatggtatttgagcacgtttagcgactttatgactgacattaccaatttccatttcttgccagatattcaaaccacgtgtactcaaaatgatagcttggtatgtacctccaatagtaatttcaataactttgtctgttgaacactaagagcaattttaatttcataatgtgttgtaaacatttttttgattggagtttttttctgagttaaacgatatcctgatgtatttttaattttgcaccatttccaaaaggataagtgacataagtaaaaaggcatcatcgggagttatcctatcaggaaaaccaagataatacctaagtagaaagtgttcaatccgtgttaaattgggaaatatcatccataaactttattactcatactataattcaattttaacgtcttcgtccatttgggcttcaaattcatcgagtagtgctcgtgcttctgcaattgattgtgtgttcatcaattgatgtcgaagttcgctagcgcctcttatgccacgcacatagattttaaagaatctacgcaagctcttgaattgtcgtatttcatctttttcatatttgttaaacaatgataaatgcaatctcaatagatctaatagttccttgcttgtgtgttcgcgtggttctttttcaaaagcgaatggattgtggaaaatgcctctaccaatcatgacgccatcaatgccatatttttctgccagttcaagtcctgtttttctatcgggaatatcaccgttaattgttaacaatgtatttggtgcaatttcgtcacgtaaatttttaatagcttcgattaattcccaatgtgcatctactttactcatttctttacgtgtacgaagatgaatagataaattggcaatgtcttgttcgaagacgtgcttcaaccaatctttccattcatcgatttcatagtagccaaggcgtgttttaacacttaccggaagcccacctgctttagtcgcttgaataatttcggcagcaacgtcaggtcttaagattaagccggaacccttaccctttttagcaacatttgctacaggacatcccatatttaagtctatgcctttaaagcccattttagctaattgaatactcgtttcacggaactgttctggcttatctccccatatatgagcgaccatcggctgttcatcttcactaaaagttaagcgtccgcgcacactatgtatgccttcagggtggcaaaagctttcagtatttgtaaattcagtgaaaaacacatccggtctagctgcttcacttacaacgtgtcgaaagacgatatctgtaacgtcttccattggcgccaaaataaaaaatggacgtggtaattcactccaaaaattttctttcataatatatttataccctctttataattagtatctcgattttttatgcatgatgatattaccacaaaagcctaacttatacaaaaggaatttcaatagatgcaaccatttgaaagggaagtctaagagtagtctaaaataaatgttgtggtaagttgatcaatacaaagatcaaggattatagtattaaattgttcattattaatgatacactacttatgaatatgattcagaattttctttggctacttttacagtaaagcgattttttagttatcttataacaaagacaaatttataaaggtgatattatggaaggtttaaagcattctttaaaaagtttaggttggtgggatttattttttgcgatacctatttttctgctattcgcataccttccaaactataattttataactatatttcttaacattgttatcattattttcttttccataggtttgattttaactacgcatataattatagataaaattaagagcaacacgaaatgaatcattaatacgaatgtgattaaacataaaactgaaggagcgattacaatggcgactaagaaagatgtacatgatttatttttaaatcatgtgaattcaaacgcggttaagacaagaaagatgatgggagaatatattatttattatgatggcgtggttataggtggtttgtatgataatagattattggtcaaggcgactaaaagtgcccagcagaaattgcaagataatacattagtttcgccatatccaggttctaaagaaatgatattaattctagactttaccgaagcaacaaatctcactgatttatttaagaccataaaaaatgatttgaaaaagtgaagtagtgaagtgtgggtgcagagagaactaagcccatcgataaatggtcgcttgttaaagaagagtgacggtcactcttctttatgtgcatattttattttgtctgttttgttaacaagcagcagtgtaacaaatatgagtaaggataaaatgagtataatatagaaaccgaatttatcattaatttcattaatccatcttcctaaaaatggagcaattaaactttgcagtaacaatgaaattgacgtccatatcgtaaatgagcgaccgacatatttatctgaaacagtgttcattatagctgtattcatataaattctgattgatgaaattgagtagcctagtataaatgatcctatgaataagtaaaatgctgagtttatccaaataaatagtgctgaatttatgactaatatgaaatataacaaaaatatcaatactttagttgagattttcttcgaaagaatagctgaaattaaacctgcacataatcctccaatgccatataacatatctgaaaaaccaaattgtacagacgaaagttttaaaacattataaacatatcctggtaatgatatgttaaagatcattgtaaacaccattggtatgattgaaataactccaaaaataaatatcatcatgttgtcttttaaaaatttccatcctaataaatattcttgcaataagctatttgttgattcttcctctgaatgagttggtttatctacatgcaatctaaataacataaaaatgctgattagaaacatcattatagtcatcgctataattagagtgaatccatttattttatataatattcctgataatccacctgcaataaacatacctgtttgcaaactaatctctaatagagaatttgcatctgtatattgatctggttttaatatctgtttaactaaacttctagatgttgccatatacgtagtccaacctatcccattaacaatcgcaaatccaatcactaaataggtctcaaatcctatcattacgagtgctatgacaatgagtaaatataatattacctgaagaagataggtgattaaaataatatttcgtctattatatttatcggctagtccacctattataggagaagctaagaaaccggataatacatttaaagctaacataatacctaatagttgggagtcgttagttttgtcgattaaataccaattagccccaactgtactaattccaactccgaatgctgaaattatttctgctaaaaagaacaatctgaagtttttaattttcaacaaatcagtcataaatatcaccttttttcaatgcaagatttatatttgcgagctcttctataaattgagagtcgtttaaaatatcgaatggtttattgccttcgccgatcaaaaatctatagttagtaatattcataaactcaaatattaatttgaattggttgactaaaggttgtgctttggtatgcggattgtcgccacctatgattaaaatcaaatactttttttgtgacatgatttctttgaagttgtctatttgcgtatctcgcaatgactcggtccatctatcaatgaagagttttaaagacgcactcatggagtaccaatagagtggtgttgaaaaaataataatatctgattctaaaactttgattaaaatttgttcgtaatcatcattatgaaagttggcacctttgctatgacgattatctgtaaccttttcaatgttgctttgatataaattcacaaagttgacttttaaattcttcaatagattctctactgcgatagctgaattgccatcttttctactacttccaaataaacaagtaatcatagtcataactcctttcgatttaccttaataataatatttaatatattattattaaatcagaattcttagaattcaggattcgataaaagggaaccctaaaggaggtactactttgaacttaaacattttaaaatcatttttagtaactagtgaaacaaagaaccttactaaagcatcagagttacttaactattcacagtcaactgtatctacacatattgaaaaattagaaaggcaattagatgttaaattattttatagaaaaaaatatggtatggaactaacggaagaaggcttagcatacgttaaatatgctaaagtgattttagatagtaatagcgaatacgagagagaaataaaaggactttacaataagaaggtaaatataagtattaacatgcaagaaagtcagtatttgtatcgctactataataagattagtgaatggttagctgaacacccatatgtaaacttgaagtttaaatccgcacattctaatttctatattaaagaagaaattgctaatttcaaatcggatattagccttatcacagacgaaaagattattaatagtaacttaactgctattcctataactgaagaacgtttaatatttgttactaacaaagagatgaaagatttcaaattaaacgatattcaaaaccatacattacttgttactgaaaaagggtgtagttacagagaacagttagaaatgattttatataaatatagcttttcaacaaaacaaatgattgaatttctaggaattgagtcattaaaaaaacacttgaaaaattcaggtgggattgcgctattgccggaatttattgttgcagatgaattagaaaataaaagtttgtttcaaatagacgtagatgtcgatattccgaatttagaaacaacattgataattaatcctgaatcgaataagcaagtacttgaatcttttgtaaaagatgtttttttataattattggtgaaaacgtgtagttatggtgaaactcaaagataataatttaaatgagatgttaatgaaaaagtaattcaatataaaaacaggtgatttatatctttaataaggattatttctagttgaaatttcaaattgcgggcattcattttcaaaatagtaaagaatttaatagatgaaaacctttgaatcatactagttagtatggattgattaatattttaacctgctaaatgagtagcttatgtattttaaatagctgtcatctagcaggttctttattattaataagttcagataaattattttagtctgttttctaatgttgataataataactttaaatctgtactttcattgtgagatatatagtacatcataaatttttatatttggattgagactctttggaagattttcaataaatgaatatttcacaaacttccacttatcaggattataaattataatttctgcaactgcattatcgaagattctaaacaattttttgatttctatttcttttagagataaagtagggaaaatgtcgatatattcttcaagcgcataaagactatgtttaacagaatcggttatgttcattgaatatatcacaccaatatttatattttgccatccaaaagaagaaataacattatcataaaatccattgaatataaattcagtcatcccctctgaacttctccataaatataatggtgaataagtatttgtaatgcaattagtagttgtttgacttattaaataagcttttataattaaatttttaaatccatcagtcttataaccatttaatcgaactctatctctaattatttccatattgtaatcactaggcaacttaacatgatattgcattgcatgcatttagcatacccccttttataaaaaggatagcaataataagtaaaatctcatattatccaattgtgatatagttatcataaaaagtgataggtgattaaattgaactttaatgatttggaaatttttataactgtatgtgaagaagcatctatcaataaagctgcaattaaacttagatatgcacaatctaatatatctcaaagaattagcaagcttgaaaatgaattaggtgtagttttgctttttagaaatcaaaaaggtgctaaggcaactaaagcaggcgaagaattcttagcgtatagcaaaaaagtattaagagatacagagactataaaaaataaaatgaaaaataatactatgtctattttatgctcagaactgttatttaattatttatctgagagcgaagaaattatgatgtcgaataactcaattaattttatttctagtggaaatattagaaaagctatagaaaaaaataattatgataaggttatttcattcataaaaattaacgactcaaattatagacttagtaatgttgatactatgaaagtaacgctttacagtaatggaagtaattatgataaagaggctttactaataaataaagatgagttttgtcctttaaggaaaataactttagataataagcttgattcacaacgggtaatggaaattgattcattggcagcaataataaacttagttaaacaaggaaaaggaaaggctttattacctatgacttttgagaataaaagagatatagtacaggacatttctaagatatttgaagttaactactatacttataatcatattatgcatcattaattgaaagttgattgagtttaaattacaggaacgattttaaaagtctagtagttagaatgagcgatgtgacagaaaagaaattatgccttttattttgtaaattcgttgttttaaagtaaaggtccttgtagtataggaaaaagtggatgacttctccgcctttaccaccctttcaagcataatgataactgctaaatattgattatagcaccattgcaaaactaatcattaattgtcatattcaactattttgaaaagtatcaatttcacattatcaaattattgagtatctcaatttattgttatacacaaacagtatttttgttatcatagagttaataaatataataaattaaacaagtaactttacaaaaattagaatgattcaattcaatcataattgtttgaaaatagaggtgagcaggtgaacgatatgttaattagtcttgtaatcccagtttttgctttgttagttattggtggtattatttggatgattatagaaggtatagtacatatttcaaaaaagaataaagcaattgataacttttttaaccaagttaataaagtaagtgagacatataaattcgctactacttttttatttctaatcttggctacggctggtatttctcaattttatctatattatatagtatcagcgtttcttttttggcttgtcatacttacctttggcattgcaggtatcatttttttaatgccatatggattatgttttctaccgttttataagcaaaaaaagaaaaaacagacatttaaaaaatacatggtttacactacgattggtttgtcaatttgtctaggcttatctctagttttggttcacactacgaaaatttatatggacgaaggtggcgtaagatactattacggtagttttgtaatgaaacaagcgggcggttatgcttatttagctttagcggtactttcaacgttgttaattgttgcgaaaaaagctacaaataaaaataaagaaatcgaaaccgtcgacaatacaaatataacggaaagataattaagggagtgctcattcaggagtgctcttttttgatgtccaaatttagttgcaaatgaaggcatagaagaaatttttatagtcatttattggataatgaattatggtcatatcgattaattttattagtgaggattttacaaacatttgttgaataaatatggtaatgataatatatgaatatttttgaaaaaacactaatatgattaaattatttgttaaaatagcattaagtaaaaaacaaatagggaacaaggtgggatttcatgagtcaattgctaaatgatacgttatcggcttggttgttaattgaatctttaagtccaggagaagtaaattttacagcggaagatatactctcagctgaacattttaaaaatggtgcaaagcaagcacaacttcaaagttttgatgaatattttgaaatatggaatgctgaacgctttattatatcagaagaaaaatcagagactggggaacttatatttaaattttatagacattgcttccgctataatgaaattaatttgaaaattcaggatatttttgatgattattctgagattcataatccaaatgggacacactgttatggttacacatttaacacagataaacacggcaaagtgatagttgattctatacatattccgatgattatgagtgcattaaaagaaattgaaaagaacaaaaatgccaatatagaagaaaaatttaatgattctgttgaaaaatttgttcaaaaagtaaaagaaattttagcagatgaaccaattaatgaatttaaattgaagaagatggacaaagcttatgatgagtacttttctgtattaaattcaaagaaagatggattatttggacattatgtagcaatagaatatgtgaaagatagtgatttaccacagccggaatttaacagcttcttcataagtgatattgagaaagcaagaaaatctcccaaccaaactttaattgattacattgaaggtgtagaagaaagtcagcgcatagaagtagatgaaaataaagaaatgtttgacaaatttttacatccttcacgtttgcctgatggacgatggccatcacagactgagtttagattgtctttaatgcaacaacttgctgtaaaccaaattacgagtggtaatgaaagaataagttcagttaatgggccaccaggtacaggtaagactactttattaaaagatatatttgctcatctagtagttgaaagaggtaaagagttagctaaactaaataatcctaaagatgcatttgtcaaaacaaaaattcatgaaacggatgataaatacgtatacttactaaaggaatctattgccaaatataagatggtagtcgcatctagtaataatggagctgttgaaaatatatctaaagatttaccgaaaattgaagaaattataagaaatcccgaaaaatgtaaattccctaaatatgaacagaattatgcaaatttagcacatgaattaaaagattttgctgaaatagctgaagatttgattggtgaaagtgcctggggcttattttctggagtttttggtaaaagtactaatattaaccaagtattgagtcatatgttaaaacaagatgcgaatgatattggctttgctaaattactacaaaatgagaataatcgtatgagttataacgagttaatgagtgaatggcaatcacatcaacgtgcatttttagaagagttgaggcatgttgaaatgttaaaagaagaatctattagagcatatgatgtttataaaaattgtgagtctttctctaagattgaacaggttattaatagtgaaaaaacaagtattgaagaacaggtatatcatttagataatgaaacgttacgagacaataaagaaatagaagatttggataatcgaattaattatattgttaagcaaatagaaactttaaatgagttaattaaatccatcaaagaaagcaacaaaggttttattaacaaactgaaagcgatgtttaattcagaagaagatgaaagctataaagatcataataaagagaagcaacaattattaacacaacagttagagttagagaaatgtaaaaaaaacaaacatgaagaccttgttagcaaactaaaagaaaaagagaaattaattaaacaattaactaaagtacagttgcaattagacgagttaaattcacagttacaagagttagaagcatatcgtattgagtcaaaaattacaattccagaaaaagatttttggagtgacaacaattatgatgagcgccaagttactaatctgtggacgagtgacgaacttcaatacagacgtgccatgctctttttaagagcaatgatattgcataaattattattgattgctaataatacaactatttattatgcgattaatgattttaaagatagaaggaaattaattgatgcaaatccagataaagtacacaacgcatggaatgtgatgcatttaatatttccagtagttagtacgacgtttgcaagctttaaatctatgtatgggggcataccaaaagatttcatagactacttatttattgatgaagcaggacaagcaatacctcaagcagctgtgggagcattatatcgttcaaaaaaagttgtagctgtaggtgatccgattcaaatagaaccggttgtgactttagaaagtcatttaattgataacattcgtaaaaattatcatgttccggaatatctagtttctaaagaagcttctgtgcagtctgttgcagacaacgccaatcaatatggtttttggaaatctgatgctactgatagtaatcaaaaaacctggataggcatacctttatgggtgcacagacgatgtttaaaacctatgttcacgatagctaaccaaatcgcttataataataaaatggtgttgccaagtaatattacaaaagtaggtaaaacaggttggtatgacgttaaaggaaacgcagttcaaaaacaatttgtgaaagagcatggtgaaaaagtagtgggattattagctgatgattggattgaagcaattaaggaaggtaaaaatgaaccgagctcatttgtaatatcgcctttttcagcagtacagcaacagattaaacgtatgttaaagcaacaactaccgactagaattgatattgaacgtacaaaaattaatcaatgggtcgataaatccattggtactgttcatacttttcaaggtaaagaggctcagaaggtgtattttgtaataggtactgataatacccaagatggtgctgtgaactggtcatgcgaaaaaccaaacttgttaaacgttgcagtgacaagagctaagaaagagttttatgtaattggcgacatgcaaagaatacagatgaaaccattttatgagacgatttttaaagaaagaaatgtaaaataacatacaaaaaagtatatagaggaagttatacattttaaaaggagcaaaattgaataatggagaaatttaacaactggatattaaatgcaataagtggatctcaaacagacaagaatgaaacaactgaagaattaaaaggggcaaaatttatcattttatatgcatattcaatgctcgttttgcttgcgttagtaatttctaacatattcattcacattttggagcctaaactatcaatcaccactcaaatcatcatcgttttgattttaattgaagcactaattggactgcgtttcttgaaagcgtacgatgttaagcgtggcaaagataaagaaaataagaaaaatagtaaggatttcgttaaactaaaatcaattttagtagcaattttatttacatcattggcgctgacagcaggtactgtagctgatatatacggtttcactgacttaggaaatactagaagtgatttaatcgtttggagcataggtggtattatatttggcctcgtatgttacacaatggaagataaaagataacgataaggagctggcgattataaagctagctccttttttaacttatatatgtaaagaactatcctaagggtttttaatcatatgtcaataatttctataatacattattaaaacatcaattaaataagttttaaaattttacacatatttttatttaaaaaagatgtataattaatgtattaaatatagaaagaagttgatattatgaaaaagtgtattaagactttgtttttaagtatcattttagtagtgatgagtggttggtatcattcagcacatgcgtcagattcgttgagtaaaagtccagaaaattggatgagtaaacttgatgatggaaaacatttaactgagattaatataccgggttcacatgatagtggctcattcactttaaaggatccagtaaaatcagtttgggcaaagactcaagataaagattaccttacccaaatgaagtcgggagtcaggttttttgatattagaggtagagcaagtgctgataatatgatttcagttcatcacggcatggtttatttgcatcatgaattaggaaaatttctcgatgatgctaaatattacttgagtgcttatccaaacgaaacaattgtgatgtctatgaaaaaggactacgatagcgattctaaagttacgaagacatttgaagaaatttttagagaatattattataataacccgcaatatcagaatcttttttacacaggaagtaatgcgaatcctactttaaaagaaacgaaaggtaaaattgtcctattcaatagaatggggggtacgtacataaaaagtggttatggtgctgacacgtcaggtattcaatgggcagacaatgcgacatttgaaacgaaaattaataatggtagcttaaatttaaaagtacaagatgagtataaagattactatgataaaaaagttgaagctgttaaaaatttattggctaaagctaaaacggatagtaacaaagacaatgtatatgtgaatttcttgagtgtagcgtctggaggcagcgcatttaatagtacttataactatgcatcacatataaatcctgaaattgcaaaaacgattaaagcaaatgggaaagctagaacgggttggctgattgttgactatgcaggatatacgtggcctggatatgatgatatcgtaagtgaaattatagatagtaataaataaggattcaataatgatattaagacgagtatgaaaatagttagattctaattattttcactactcgtttttattttgaaaataagtaataattcaacaatattataaattgaacagattgtttgtgaaatttttgataatattaaagtgaaaaagtgttataaattgataaatatatgtaattaacaaaaacaaatcattttaaaaagaagagagttgtaagatgatgaaacgattaaacaaattagtgttaggcattatttttctgtttttagtcattagtatcactgctggttgtggcataggtaaagaagcggaagttaagaaaagctttgaaaaaacattgagtatgtaccctattaaaaatctagaggatttatacgataaggaaggctatcgtgatgatcagtttgataaaaatgataaaggtacatggattataaattctgaaatggttattcaacctaataatgaagatatggtagctaaaggcatggttctatatatgaatagaaataccaaaacaacaaatggttactactatgtcgatgtgactaaggacgaggatgaaggaaaaccgcacgacaatgaaaaaagatatccggttaaaatggtcgataataaaatcattccaacaaaagaaattaaagatgaaaaaataaaaaaagaaatcgaaaactttaagttctttgttcaatatggcgactttaaaaatttgaaaaattataaagacggagatatttcatataatccagaggtgccgagttattcggctaaatatcaattaactaatgatgattataatgtaaaacaattacgcaaaagatatgatataccgacgagtaaagctccaaagttattgttaaaaggttcagggaatttaaaaggctcatcagttggatataaagatattgaatttacgtttgtagagaaaaaagaagaaaatatatactttagtgatagcttagattataaaaaaagcggagatgtataatcatggctcaatcagaatatgaaatcaatcccggaaaaagagagtgatgaaatgataaaacgtgtaaataaattagtgcttggtattagtcttctgtttttagtcattagtatcactgctggttgtggcatgggtaaagaagcggaaataaagaaaagttttgaaaaaacattgagtatgtatccgattaaaaatctagaggatttatacgataaagaaggatatcgtgatgatcaatttgataaaaatgataagggaacatggattgtaaattctcaaatggcaattcaaaataaaggagaagctctaaaaataaaaggcatgcttttgaagatagatagaaatacaagaagtgcaaaaggattttactatactaatgaaataaagacggagaaatacgaagtagctcaggataatcaaaaaaaatatccagttaaaatgattaataataaattcatttctactgaggaagttaaagaagaaaacataaaaaaagaaatcgaaaactttaagttttttgcgcaatatagcaattttaaagatttaatgaattataaagatggagatatatcatataatccagaggtgccgagttattcagctcaatatcaattaactaatgatgattataatgtaaaacaattacgtaaaagatatgacataccaacaaataaagcgccgaagctgttgttgaaaggtacagggaatttaaaaggttcatcagttggatataaaaaaattgaatttacttttttagagaataaaaatgaaaatatttactttactgatagtctacatcttgaaccgagcgaggataaataatcatcttttaaccagaatatgaaatcaatctaggacaacctaataaaaggagagagttgtaagatgatgaaacgattaaacaaattagtgttaggcattatttttctgtttttagtcattagtatcactgctggttgtggcataggtaaagaagcgaaaataaagaaaagttttgagaagacattgagtatgtatccgattaaaaatctagaggatttatacgataaagaaggttatcgtgatgacgaatttgataaaaatgataaaggtacatggattattggttctgaaatggcaactcaaaataagggggaagctctgaaagttaaaggtatggtcttgtatatgaatagaaataccaaaacaacaaaaggatattattatgtaaatgcaataaagaatgataaagacggaagaccccaagagaatgaaaaaaggtacccagttaaaatggtcgataataaaatcattccaacaaaagaaattaaagataaaaacataaaaaaagaaatcgaaaactttaagttctttgttcaatatggaaactttaaagatttgtcgaagtataaagacggagatatttcatataatccagaggtgccgagttattcggctaaatatcaattaactaatgatgattacaatgtaaagcaattacgtaaaagatatgacataccaacaaataaagcaccgaagttgttgttgaagggtacagggaatttaaaaggttcatcagttggatataaagacattgaatttacgtttgtagagaaaaaagaagagaacatttactttagtgatgggttaatttttaaaccaagtgaggataaataatcatgactcgatcaaaatatgaaatcaatccaggaaagataataagaagaataggattgtgaaattatgaaacgattaaacaaattggtattgtatattagttttttgatattagtcattagtttcactgctggttgtggcataggtaaagaagcggaagttaagaaaagctttgaaaaaacattgagtatgtatccgattaaaaatctagaggatttatacgataaagaaggttatcgtgatgacgaatttgataaaaatgataaaggtacatggattattggttctgaaatggttgttcaacctaaaggggaacgtatgaaatcaaaaggtatggttctatatatgaatagaaacactaagactacaaccgggaagtatatagtgagtgaaacacttcatgatgaagatggtagacctaagagtaaagataaagaatatcccgttaaaatggtagacaataaaatcattccaactaaaggtatcaaagacgaaaatataaaaaaagaaatcgagaattttaagttcttcgcgcaatatggcagctttaaagatttgtcgaagtacaaagacggcgatatatcatataatccagaggtaccgagttattcagcaaaatatcaattaactaatgatgactataatgtaaaacaattacgaaaaagatataaaataccaacgaataaagcaccaaagttattgttgaaaggttcgggagacttaaaaggttcatcagttggatataaagacattgaatttacttttgtggagaaaaaaggtgaaaatactttttttactgatagtctacatcttgaaccgagtgaggataaataatcatccacacacacgattcaatatgaaattcaaatatgttgctgtaaaataatgtaaaataaacgtattcatattactgaattgagggatagtatgcaacgtgattatttaattcgagtagaaactgagagtatgtcagatttcaaaaggctcaatagtttaatgattggttttgttattaaaggtgaggcacacatttatgatgaaaataatatgacgcaatgcaacagtggcgacattttcatcattaaccaccgcgacttgtatcgatttcaacttcaacaagatggcatcatatgttatatccaattccaaatgaaatatttagcagacaagtttgatgatgtgcattgtctatattttcacttaacagatgcgaccacaacaaagaatatacatcaactgagaaatataatggcaagactggtttcaacacatatccgacataatgagttgtctaaattgactgagcaacaacttgtgattcagttgcttatgcatatgattcattatgtcccgcgtacatatcattcgaaccaaagtatcttaaatgatgataaagtgaatcaagtatgcgactatatcgagttacattttcatgaagatttaagcctttcagaattaagcgaatacgttgggtggtcagagagccatctgtctaaaaagtttacagaatcgctaggtgtaggattccatcatttcttaaatacgacgcgaattgagcatgcgaaactcgatttgacatacacagatgaaaccattactgatattgcattgcaaaatggcttttcaagtgcagcgagctttgcgagaacatttaaacactttacgcatcaaacacctaaacaatatcgaggtgatcgtccagcaatcactgaaaaccagcaatcggcacaacatgattatcacgaccgtgaattgatattacttttaaatgactacattgaagaaatgaatcattttattgaagatattgaaaagatgaactataaagagattgcctttcaaccaaccaatcaccaactaaatcaatttaatcatattattcaagtgggctatttgaggaatttgctcaatacacagtatcaatcacagttgcttacatgtcatcatgattttcaagtcaatgaagtattagcatatgatgtgattccatatatcatgaaaaagctcaatgcgccattcacgtatgatgcagaaatttcgaatatattttatgatattgatttgtgtttagactttttattagatcataactttagtttgaccatgcatttggatcagtatgactcacgtgattatatcgatgcatttaaaatttttatccatcacgttgccctgcatgtcagtcatagaaaagatttgaagttcaacttgtatgtgacgacattgcacacgtctttgattgaaatgattgattattttaaagcattattccctaatggtggcttgtacattcacttagatcaagctacggaaagacatctaccattattgaaacgacttgagccacacatcgaccattttgtatttgatgccaattcaaatgacgctgttgattttaataaaatgaatgatgatgaatttaaaaccgcgagtcaaatgattattaataaaacgaattaccttatcgacttaatgcatcgtcatcgcctaaagcgtccactcattttactcaattggaatacattgacgggtgatacatttattacaaacggcgaatattttagaggtggtatcatcattgagcaattattaaaattaagttctaaagtagagggtatcgggtattggttgaattatgatttgcacgtcagtcattgtaaaaatgaacgggattatatgaattctattgaactatttcatcaatataatggaaaacgtccggtctatttcacggcattgctatttaataaattaacaagcaatattttgtattctgatgatacatgtattgtcacggggactgattcaaattttcaaatattgttatatgatgcaaagcattttaatccgtacttagcgttggacaatcaaatgaatatgcgtgcgacggaaatgattcatttgaacattaatgccctggaagaaggtatgtataagattaaacattttaccttagataaagaaaatggtgcgttatttaatctttggcgcaaacatcatacgatacatggcatggacaaggactctatagattacgttaatcgaatgagttttccgaaattagaagtatatgatatagatatcacggacacactggcattaaacattaaaatgattacgaatgggattcacttaattgaagtaaaacgttacccaagttcataaaatgatcacaaatcacaaattttgatatacataatttgtgattttttatattcaaagctaaaattgcaaaaaattaatggttaacatctctgttgttggcaatataaataatgattaatcatttatgatgtaactaaggagatgaaggatatgaatcaacaattaattgaaactttaaaatctaaagaaggcaaaatgattgagatcagacgttatttacatcagcatccagaattatcttttcatgaagatgaaacggcgaaatacatcgctgaattttacaaaggtaaagatgtggaagtagaaacgaatgtcggaccacgtggaattaaagtaacgattgattcagggaaacctggtaaaacattagcaatccgtgcagactttgacgcattacccattactgaagatacaggattatcttttgcatcacaaaataaaggtgttatgcacgcatgtggtcacgatgcacatacagcatacatgcttgtattagcagagacgcttgctgaaatgaaagatagttttacaggaaaagtcgttgtgatacatcaaccagctgaagaagtaccaccaggtggtgctaaaacaatgattgaaaatggtgtattagacggtgttgatcatgtattaggtgtacacgtcatgagcacaatgaaaacaggtaaagtgtattacagacctggttatgttcaaacaggacgcgcattcttcaaattgaaagttcaaggtaaaggtggtcatggttcatcaccacatatggccaatgatgccattgttgcaggtagctacttcgtcacagcgttacaaacagttgtatctagacgactaagtccatttgaaaccggtgttgtcacaatcggttcatttgacggtaaaggtcaattcaatgtcattaaagatgttgttgaaattgaaggtgatgtacgtggattaacagatgctacaaaagcaacaattgaaaaagaaattaaacgtttatcaaaaggattagaggatatgtatggtgtaacttgcaccttagaatataacgatgattatccagcattatataatgatccagagtttactgagtacgtggctaagacgttgaaagaagcaaaccttgattttggtgttgaaatgtgtgaaccacaaccaccttcagaagactttgcatattatgctaaagaacgcccaagtgcctttatttatacaggtgcagcggtggaaaatggtgaaatttacccacatcatcatcctaaatttaacatttcagaaaaatcattacttatttctgcagaagcagtagggacagttgttttagattaccttaaaggagataactaacatgaatgaaacgtatcgcgggggcaacaagttaatcttaggtattgtattaggtgttattacattttggttgtttgcacaatcacttgtaaatgttgtaccgaatttacaacaaagttttggtacagacatggggacaattagtattgcggtcagtctaactgcactattttcaggcatgtttgttgttggagcaggtggtctggcagataaaattgggcgcgtgaaaatgacgaatatcggtttattattaagtattattggttcagcattaattattattacgaatttaccggcattattaattttaggtcgtgttatacaaggtgtatcagcagcgtgtattatgccttctacattggccattatgaaaacttattatcagggtgctgaacgtcagcgtgccttaagttattggtctatcggttcttggggtggcagtggtatctgttcactcttcggtggtgcagttgcgacaactatgggttggagatggattttcatcttctcaattatcgttgccgtactttcaatgttactcatcaaagggacgcctgaaacgaaatcagaaattaccaatacacataaatttgacgttgcagggctaattgttctagtagttatgttgctaagtttaaacgttgtcattactaaaggtgcagcacttggttacacatcattatggttctttggtttgattgcaatcgtaattgtagcattctttattttcttaaatgttgagaaaaaagtagataatccacttattgattttaaattatttgaaaataaaccatatacaggtgcaacgatttcgaacttcttattaaacggttttgcaggtacattaattgtagcgaatacattcgtgcaacaaggtttaggttatacagcattgcaggcaggatacttatcaattacttatttaatcatggtgttattgatgattcgagttggtgaaaaattattacaaaaaatgggttctaagcgaccaatgttattaggtacattcattgtggtcattggtattgcacttatttcattagtattcttaccaggcatattttatgttatcagttgtgtcgtaggatatttatgtttcggactaggcttaggtatttatgcaacaccttctacagatacagctatttcgaatgcaccgttagataaagttggcgttgcttcaggtatttataaaatggcttcatcacttggtggcgcattcggtgtcgcaattagtggtgctgtatatgctggtgcagttgctgcaacgagcattcatacaggtgcgatgattgcactttgggttaacgtattaatgggaatcatggcatttatcgcaattttattcgcgattcctaatgatgataaacgtgtcaaagatgcgaaataataacgatgacacgccaagtgttttgataatgatataaatgaaagtaaagcaaattaaatgaggaaatgtatagagcagtgcatatagataaatctatgattggattaacactaatataaatataaatgaaaatgaaaaaccatccacttaaatttttgataagttaggtggatggttatttattgcgttgttctaaaaatttggacatttatatggaaagaactatatataatgtgaaggttatggcaattcgcttcaatgaaggcgacgtgtaaaagtgtatattaaacgtttcggggtcagactccgagaacagtgtccgtcatgcttaccgcatactaatgaagcattattatatcagtgtttatagccgatttaagataataaattttgctaaacaaaaaagccaacccatgaatgttggattggctttttacatgcatctgaatctctaattttaaaaaaatatgaatataaataagacagtaaaaattaaatttcagttgttgcaatttcttcatctgtaggtacatcatcgttaaggccaacaagtgcttcagaaacatttcgtgaatgataaccgatacgttcaagaacaccaatcatatcgatatatagtaatccgccttttgttgtacattcaccacgattaaggcgtttaatatgacctttgcgtagtttatgttcaatattaaatgattctctactacgttctacaatttcatcttttttcgttttgtcataaacatctaacatgtcgatggctttatcaaatgactcagcaacatggttgaataatttatccataccgcgttgtgcatcttctgtaatgcgaatatcttcatcatgttggcgttttaattgagcgacatactcttctgttagctctgctacttttaaaatagagcgattgacatcaaacataactgctaaacgctcaacgtctgccttcgtaatggcttttgtagaaattctaactaaataatttcgaatgctatcattgattgtttcaacagcttgatgcttttgttcaagctttttgatcaattttttatcgtcttttgtaatttcgcgaatgtcttcaaacattgataagacaatctgacccacattttgtaattctttttgagtttcttgtaatgcaacaccaggtgcgtgataaacaagatctttgtttaagtgctgaggtttatagtcatcagcaatatctttacctgggacaagctttgtaacaatccatgctaaacctgctacaaatggtaattgaatcaaagtatttgttatgttgaagataccatgtgatactgcaatcgtcatcgctggttttaagtgccataaatcttgtaacaaactaatcaaatgaatcacaactggcaagaaaattgtgaagataattaccccgattaagttaaagatgacgtgtacaagcgccgcacgttttgcagcgattgagccggctaaactagctaagatagctgtaatcgtggtaccaatgttatcgcctagtaacacagggattgctgcgtttaagctaattaaatcttgttgataaaattcttgtaaaataccaatcgtcgcacttgaactttgaactagtgctgttaaccctgcgccgacaatgacagcgagtattggatttgtagacatatcaagcattaattgcttaaatccatctaatgatgctaaaggtttaacggcatcacccataaattctagaccgaagaatagtgaaccgaaaccgaatagtatgcggccaatgttattgattttagagcgtttaaagaaaaagattaagaatgcacctaatgctaaaattggcattgcatattcgcctaaatctataccgataataaatgcagttaccgttgttccgatattagcacccattatcactccaatggcttgtttcaatgtcataaatccagctgttaccagtccgattgtgataactgtcgtacctgaactactttgtattaaaatagttacaacgatacctgcaataacacctaatactggatttgatgtaaatttgtttaaaatatctcgtagcctgtctcctgctgatgcttgaagcccgtctcccatgatttttaagccgtaaaggaaaatacctaaaccacctaaaaaggagaaaatgacttctgtaaccgacatttccattatttcacctcaaataagctttatatttagattatcgcttataattgtaaatttaatgttaagattaggtaaaattatttaacaatatatgttatttgtatatgacttgtaaaatatcgtcacttattatgtaaattttcagtgtgaaatggcaggtttgcaatcacttgtttaacaaaatgatgcaatcaatcatgtaattatgtttcatcaaaaaaatcatgagagtggaacaacgaaataatttttatgaaaacatcatttctgtcccagtctcatgatttgaaatcaccaaataaaaatctattaatggttttcgttataacaatttgtgttcttttaataatgactcaatgtacgtaccttttatctttttaaggaatcctgctaatgcgagtttttgcattttcgaatctttagtaatctcacgcaaatcttggtggtcattcagttcgtatatggcatccattaagacgcgaagatcaaatggactattgatgacttctggaataccacgatctatatttagtaattgataaacagcttccatggcagtacgaaccgaatattctgttgtaaatacagtgtctcgctctgtttctgcaaagttaccaataaatgctaagttctgagattgatgcgggacgactaaaggtctgtcgccgatagcacgcgtcatgaaataagatgtgatatatggcatataaacaggaatcgtattagatgcatgttttgctaagtcttcaattttgtcagttgatacacctaagtgatacagccattcttggcatatttcattaccactacattctgtaattggctttttaatataatcgccgtttacatctgaatataaggcataaatccatgtagatatttcattttcaggttggtctttaaactgttgctgacgattgattgtaaaactcatttgccatgcagaatcattgattgtaataataccgcctgtaactgttttgcctgcaagtgggtcacgtttacaaatactttctattgtatcgataatctctttattgtttgttgtagaagttgctgaaacaaaccaactttttttaggaatattttggcaaaacttatcaggattaccaaattcaggactttgtcgcgctaaatttttccatagtgtccaactaccacctaattcgtcagttggtggcgctggtgtatcattatcaccataagtagagctttctgtaatactaccgtttgtcacaaagacaagatcgtttatagtcagtttaatagattctgcattaccattacggtcaattaatatttctcgggcaattttttgacttgtcgtaacatctattttaatatcttcgacttttacatcgtattcaaattgaaccccatgcgattttaaatattcaaccataggtaatactaaagattcatattgattatatttagtgaattttaaagctgaaaagtctgcgagaccactaatatgatgaacgaatcgcattagatagcgacgcatttccattgcagaatgccacggttcaaatgcaaacatcgttttccagtaaatccaaaagtttgaattaaagaagtcatcggaaaatacatctgttattttgacatcatctaaatcttcttcattcgttaagcataaatctaaaatttctttaatcgccgttttagtcaaagtgaagtctccgtctgtgactaaacgttgaccctgtttctcaataacacgacagcgagaatagttagggtcttctttgtttagccaatagaactcatctaatacagacgcgttatcgatttctaatgaagggatagatctgaataagtcccacaaacattcaaagtggttctccatttcacgaccaccgcggacaacatagccttttaaaggcatattttcaccatcaagactaccacctgctttaggtaactcttctaaaatatgaatcttcgaaccttccatttgaccatcccttattaaaaaacaagctgcagcaagtgaagctagaccagatccgattaagtaagcggatttgttttctacattttcaggttttttagggcgcgcaaatgcttcataatttccataactgtaatacatatccaccaagtcctttcgtattagaatacactcagactatacccctttgtgaattgcaaatattagtatttatattggtaaatttgacgaaattagatcatttttatatttttgatttttaaaattttatcactcgaatgtttttggattctgaggtgcgggacttggaataattatgtattttgaaagaagttacttaaactaacgcctagtagagtgataattccgcctataatagcaagggttgttggtagctcgtctaataacagataagataataataaagaaacgataggtgttaaataaagagacattgttgcatcagagacaccaactgacttcacaatataagcaagcaaaacgtatggaattatagtagggaatatagctaaataaagtaccgatactattgatgtaaaagtggcgccgtgtatatcgttgatgatttcaggaataaaaataagcataaatggtgagcttgccattattgtatatagtgtgaaagcgatgaagccgtatttttctatgtattttttctggaaagtaaaatacaaactttcactaaaagatgcaagtaaaataataaaaacacctaatacattaatagttgtgtaatcatctttacttattgaaataatggatattcctataaatgcgacgagtgaacttaaccaattccattttgaaaaatgctcttttaaaaatatataagctaaagcactagaaaaaataggcgttgtagagactagaattccagatatacctgcactaatcaaagtttcaccaaaatttaaagctgtgtgatatatcacaaatccacaaaatcctaaaataaaaataacagggatatctcttagttcaggggtaggcaatttctttataattacgaacggcaagagaattattgttgctaaaattaaacgaaatgccgacaatgattctgcactaaaatcatttaacgcaatctttatcattggaaatgcagatccccacaatatgatagtaaataaatatgatagaaaagtagtgtctcgaagtttattcattaatatcatcactcctttaattatgtgtttctatattaaaaaatatgatttaaaatgagtacaaccaattttgaatggatttacctatccaattttaaaagggagggagaagatggctaaatataaagatattgctagtgacataagagataaaataatcacaggggattggttttatggaatgaaaataccttcacataggcagttggcgatacagtacaacgtaaatagagtaacgattattaaaagtattgagttattagaagctgaaggatttatctatactaaagtaggtagtggaacatatgttaatgactatttgaatgaagcacatattacaaataagtggtctgaaatgatgttatggtcctctcaacaaagaagtcagtatacggtgcaattaattaataaaattgagacagatgattcgtatatacatataagtaaaggtgaattgggtatatcgttaatgccacatattcaattgaaaaaagccatgtctaatacagccagtcatattgaagacttatcttttggttataataatggctatggttatatcaagttaagagatattatcgttgaacgaatgtcaaagcaaggtataaatgtaggtagagaaaatgtaatgatcacttcaggcgctttacatgccattcaacttttatctattgggtttttaggtcaagatgccataataatttcgaatacaccatcatatattcactctacaaatgtttttgagcaattgaattttagacatattgatgttccttataatcaaattaatgaaattgataccatcattgatagatttattaattttaaaaataaagcgatttatatagaacctaggtttaataacccgacaggtcgttctttaacgaatgagcaaaagaaaaatataattacttatagcgaaagacataatattcctatcattgaagatgatatctttagagatattttctttagcgatccaactccttctatcaaaacttatgataaattgggaaaagttatacatataagcagtttttcaaaaacgattgcaccagcaataagaataggttggattgttgcttctgaaaaaataatagagcaattggcagatgtaagaatgcaaattgactatggatccagtattttgtcacaaatggttgtatatgagatgttgaaaaataagtcttatgataaacacttagtaaagttaaggtatgttttaaaagataaacgagactttatgttaaacatcctcaataatttatttaaggatatagcacattgggaggttccaagtggaggttattttgtatggttagtctttaaaatagatatagatattaaatatttattttacgaattgttaagtaaagaaaaaatattaatcaatccgggttacatttatggcagtaaagaaaagagtataaggctatcttttgcctttgaatcaaatgaaaatattaagcatgcgctctataaaatttatacatatgtgaaaaaggtttaattaaaacaataattcgaatcattatgtggcatgttaaacagctaaatataagctatgcacatttaacaagcggatactcctgacgcaattatagtatcattacatattgtttaatcgtttggggtaatgtaattaaaaggtaaaataggcagagtgttatacataaaatgtaaagaaagaggcgatagaatgtctaaaatcaggtcttttacaatattaagtctacttatttacttagctatgatgtgctatacagtagtgacctatccaaaattaccaaccaaagtgcctattcattataatttagcaggggatgctgataattttgctgataaatgggtgctgcttttgattaatagcgcatttatagtgatttggcttatatttttcattgcaggtagatactatgaacgatttgccaaatggtcacattataatcatacaccacgtgaaattcgagcgattaaattatttttaagtacgttaaatttagagattatgagctatatgtctatcttcacagtattagaaatttggcaaatacaacaccatcatcaattcaatttactatggtttaatatgatatttatcattatcattggtttgacgcttgtcatattttgtttacttcctacaattcataaaatgagagattctcaataaaaatataaactctcatgatgcagttttgaagcgaattcctgagattattataaataatatctagtatttataattaaaatgatatattatttattatagttaaatattgtgtatattttgtgaactttttgtaaaaattcgattgcctgtcacatataggagtgttacattttaaatatgtgatcatcgcaaaatataagttgaaataggttgtagattaatcagaatgataaatattttatataaagagagggagtcattatgacactacttactgtaaatccattcgataatgtcggattatcagccttagttgcagcagtacctattattttatttttattatgcttaaccgtttttaaaatgaaaggcatttatgcagcattgacaactttggttgttacattgattgtggctttatttgtatttgaattaccagcgcgtgtatcagcaggtgcgattacagaaggcgttgttgccggtattttcccaataggatatatcgttttaatggcagtttggttatataaagtttctattaaaacaggacaattttctattattcaagatagtattgcaagtatttcagtggaccaaagaatccaactattattaattggattttgtttcaacgcatttttagaaggtgcagcaggatttggtgtgccaattgcgatttgtgcagtattattaattcaacttggatttgaaccattaaaagcagcgatgttatgtttaattgctaatggtgcggcgggtgcctttggtgcaattggtttaccagttagtattattgatacgtttaacttaagtggaggcgttacaacattagatgttgcgagatactcagcattaacacttccaattttaaactttattattccatttgttttagtattcattgtagatggtatgaaaggtattaaagaaattttacctgtcattttaacagtgagtggtacatatactggattacaattattattaacaatattccatggtccagaactagcagacattattccatcactagcaacaatggtggtgttagcatttgtttgtcgtaaatttaaaccgaaaaacattttcagattggaagcgtctgaacataaaattcaaaaacgaacgcctaaagaaattgtctttgcttggagtccgttcgtaattttaactgcctttgtattagtatggagtgcaccattcttcaaaaaattattccaacctggaggtgcacttgaaagtttagtaataaaattgccaattccaaatactgtgagtgatttatcgcctaaaggaattgcgttgcgtctcgatttaattggtgcaactgggacagcgattttattaacagtaattattacaattttaattacgaagttaaaatggaaaagtgcaggtgctttattggtcgaagcaattaaagaattatggttaccgatccttacaatttcagctatcctagctattgctaaagttatgacatacggtggtttgactgtagcaattggacaaggtattgctaaagcgggagcaattttcccattattctctccagtattaggttggattggtgtgtttatgactggttcagttgtaaataacaatactttattcgcacctattcaagcgacagtggcacaacaaatttcaacaagcggttcattacttgtggcagctaacactgcaggtggtgtagcagcgaaacttatttcaccacaatcaattgccattgcgactgcagctgttaaaaaagttggtgaagaatctgcattattaaaaatgacgttaaaatacagtattatatttgttgcttttatttgtgtttggacgtttatactaacgttaatattctaaatataaataatgttgtcacttggattcaaatgacattttaaatctaattattcatgaatcgaactagtacgaaatgcaatgagcatcttgtctagttcgattttttaatgcctaaaaatgtcatatatgtaatcagagtagaaagtgttgaggcgtttcagaagttgtttagaaaagtaagtaaaataaaaaatgcactgagcaacaaaagatgttgctcgtgcatttagatgattcttatcatttcaaataagaatgtgttaatcaacgtatataagttaaaattggtttggataaaatgatatctatcgttgtgtattgtttgtttttatagttcgcgacgacgtccagctaataacgctgcacctaaggctaatgataatccaccaaatacagttgtaccgatgaatggattttcttcaccagtttctggtaatgcttgagctttgttagcatctgcatggtttgctggttgcttcttatcaacaacaagttcttgaccaggtttgatcatgtttttatcagctaatttgttatctgcagcaattttgtcagcagtagtgccgtttgcttttgcaatgtcatttactgtatcaccaggtttaacgacatgtactccgttaccatcttctttaccaggtttgttgccatcttctttgccaggcttgttgccgtcttctttaccaggttttttgttgtcttctttaccaggcttgttgccatcttctttaccaggttttttgttgtcttctttaccaggcttgttgccgtcttctttgccaggcttgttgttgtcttctttaccaggcttgttgttgtcttctttaccaggcttgttgttgtcttctttgccaggcttgttattgtcttctttgccaggcttgttattgtcttcctcttttggtgcttgagcatcgtttagctttttagcttctgctaaaatttctttgctcactgaaggatcgtctttaaggctttggatgaagccgttacgttgttcttcagttaagttaggtaaatgtaaaatttcatagaaagcattttgttgttctttgttgaatttgttgtcagcttttggtgcttgagcatcatttagctttttagcttctgctaaaaggttagcgctttggcttgggtcatcttttaggctttggatgaaaccattgcgttgttcttcgtttaagttaggtaaatgtaagatttcatagaaagcattttgttgttctttgttgaatttgttatccgctttcggtgcttgagattcatttaactttttagcttctgacaataggttagcactttggcttgggtcatcttttaagctttggatgaaaccattgcgttgttcttcgtttaagttaggcatattcaagatttcatagaaagcattttgttgttctttgttgaaattgttatcagctttcggtgcttgagattcgtttaattttttagcttcacctaaaacgttagtgctttggcttgggtcgtctttaagactttgaatgaagccgttacgttgcgcttcgtttaagttaggcatgttcaagatttcatagaaggcgctttgttgatctttgttgaagttattttgttgcgcatcagcttttggagcttgagagtcattaagtttttgagcttcacctaaaacgttagcactttggcttggatcatctttaaggctttggataaaaccattgcgttgatcagcatttaagttaggcatatttaagacttgataaaaagcattttgttgagcttcatcgtgttgcgcagcatttgcagcaggtgttacgccaccagatataagtaatgtacctaaagttacagatgcaatacctacacctagtttacgaattgaataaatgtttttctttttcaaattaataccccctgtatgtatttgtaaagtcatcataatataacgaattatgtattgcaatactaaaatctatatttataattaaatttaaaggtaagttttacaacttataaaataaatattttgctgaaagatttattcaggaagtaaaaggcttaaaaccgcaaaatcacgctatttcgattaataaaaacagataaaatatagagatattttttataatgaaagcggtttaatacatatgagttaaaaaatatttttaagaataaagtggggctttgaatgtgctgaggtttaatttcggaaatggttttaagtgatatagaaaatagaaagttgttcattatgtgctgaggttttattaaaaaatagaaaacacaagtgcactttagaatacagcacacttgcgtaatagagatattattcaaaaacaagatgtaaatgatctttatctgctaataattgattcacttgagctaataattgttcagcatggtcttgctgcgcgtcatccatatgaattaaaatttttctttcatcttcagttgagcgttcttttattagatagccttgcttttttaaattattgagagctctaacagtttgagggtatttatggtggattgtttcaattaaatctttaagaagaacgatgtttttattttgagaagtgataatagctagaattgtgaattctacaaaacttaatgttagatgttttttgataatattcttgaaatacattgtatacatcatcaagtttagaaattctttactatcttttggtatcatctgtgattcactttgatctgcaaggttaaattgtttaatgatttgatcaaacaatgtaacacgttctgcaattttctctcgttgttcttcagatattgaaatgtaagtattacgctcatcaattttacttcgaactttactaatatatgaatgtttcacaagtacttttatatgctgtactaaatccgattgtttataacataaatctgaaacaatcttcttaaatggaagtgtgttttcttgctgatgaaataaataagtcagtaatataaattcttttatagtcatatcgacttcaggcttgacttttttcttaaaacgaaacatatatgcttcaatgattataaaatctctaattttgtcatggttattatatttcattgttttatctccttgtatatgcactttattttaatataacacaatataataagaaaaataatccataatttacaattaaaaataatatgatatttttattaaaatttgtgtttttgaataaatgacattatcaaacactatatttaaataagaaatagttatcgatatttgaaaaatcgaagaatattgattgatattatagaatatgagtcggtgttatttgtatataaagtattaatatgtaattaagaaagtcgacgcttgttaacaataacaacaactatatgtataaaaaaacctcgcaacggttagttaactgaatcatttagctaacttcgttgtgaggtcattttgttttaataatatcgttataactttttcacggttaataataagtatatgaagaatggggcaccaaaagcagcaataaatacacctgctggcacttctttaggcaagaataaggtacgcccaattaagtctgcaataacaattgatatggcaccaatcattgctgacattagtaactttttagcataacttccgcgaacgattgttttcgcgatatgtggtgcgattaaaccgacaaacccaatgttacctactaaactgattgccatagatacgagtatagtagaagtgattaattggattagtttcatacgttgtacatgtaagcctaagccaatcgctacagggtcatcaagtatagatattttcatttttggtataacaagaaataacaacggcacaacagctaaaataaccatacccaaaatgattgtatctttaaacgtagcaccgtaaagacttccgactagccatgtataagctttggcagcagataattgcttcgttgtaatgagtaatccttggacaagcgcaataaacaacgtttgcatcgaaataccgatgattatgagtgttgtcgggcgtatttgtcctttcgtttgaaacactaatagtatcatcattgcaactgcgccacctaatactgcaaatagtggaagtaaatgtattgttaaatggctgaaaaatgcaataaagacaacagcacttaagctagcaccacctgtgataccgataatatcaggtgaggcaattggattttttaatacattttgcaacattaaaccactcattcctagtgcggcacctgctaaaatcgcaagtgtaatgcgaggtaagcgtaatacttctaaagtgaattgatccatactgtcatttggatttataaagtacatcagtacgcgttgtaatggtataaagcttgaaccaatcatcatacttaccactgaaacgatggctaaaaagattaacgcgaagatgagatggtaattgtcttttttattaatcttttcggtcataagcgttgacgtcctttcttcataatatagattaagacaatagcgccaatgacagcggtaacgacaccgataggcaactctagtggcttaattattatacgagcaacaatgtctgaaatgatcattaggattgctccagctaatgcagtaaaaggaattaaatacttatagtttggtggtaataatcgtttgctaatattcggtacgataagacccacaaagacgattgatccagctacggctaccgaaataccggctaacatactgatgagcataataatcatccatttgattaattttatgttttgaccgaggccggttgcaatgtcgtcacttgtcatcaagatgttgatgtgtgcagccatgctaaatgcaattaaaataagtatcaatacaagcggaataatccatgggatatcccaaatattacgtaatgaaacggagccacttaaccaaaataataggccttgtaagtctgtttcgttcataataagtatgccttgagtaaaggctgtaaatagcatcgcaatcgcagcacctgccaaaatgacacggtgaggtgagaatagtgtttgtctaaacatacctagtgcaacaactaatacagtaacaacaatagcccccaaaaatgcaataactacaatcattttaaaagattgaatttggataaatgtaatactaaaaatgacaaaaaatactgcgcctgcattgacaccgaaaagccctggtgaggctattgggtttcgtgtaagtgcttgcatcaacaaacctgagacagcaagggcagcaccagtcaataacgcaatgattgttctcgacgcccgtgcaccagtgacaacatcatgtaaatcgttttcactatcaaagttgaataacgcctgtatcaccgtacctggtgacacaagcgtatttccaatcattaaacttaagatagctactattgcaagacataaaccagcaataacgatttggtattttggtttaagtagcatcgtaaaactccttaattattttgattgtttttcaatatttaacttttcatataaatcgtcaataagttttaatgaagatttatatccgccagctaagttccaagtgatttcatctaaatcatcagatacttggttgtttttaactgcgtctaaatttttccactctttacttgaagtccattcgctttcagtctttttaactaatgcagcatctttcgcatttggatctgattttactacaaaaatatgatcagcgttcattaatggaatgctttctttagatgtaagttggataatatctttaccattatcaacttgtttttgtaagtctttattacgtttgaatcctaaatcatttaagatttcaccagcatatccaccagcataaattcttgtatgatcagcacggaagttaacaactgaagctttcaatggccatgcatctttatactttgcttttgcatctttttggaatgcagctactttatcatcgtactttttaagtaaatcttcagcttctttttctttccctaaagctttcctcattaacttagttgtatctttgaatttgaaaactgtatcagtagaaactgttggtgcgattttagataattgatcgtaaactttttcatttctaacttttgacgcgacaattaagtccggttttaatttagagatttcctctaagttaggtgcaggttcttgacctacaatcttagtatcttttaaatcattttttatgtattcgaatttcggtttttgtgtccatgattctacagcacctacaggtttaacacctaaagatacagcgacgtcagtggcaccttgatatagcgtaacaacacgctttggtttccctttaatttcagttgtacccattgcatgtttaattgaagttgtttccttatctttgttatcagatgattgtttatttgaattcccactacatcctgctaaaacaagtaggaaagcaagcgtaacaacaagcattttaattactttattcattgactaattagcctccttcgtgatgtatgacaatgagaatcattatcacgatttagtatgaattaaattttttcctaagtcaataaaatatttatgatttacatgcaacttataattatttgacatataaatgcataaaaaatataatcctaattacttgatagtgagaatcattatcaattaggtaacacacaatattatagaattttaaatttgaggaggaagcgcttttgattgaaaaaagtcaagcatgtcacgattcattgttagattctgtagggcaaacacctatggttcaacttcatcaactatttccgaaacatgaagtgtttgcaaagttagagtatatgaatcctggaggcagcatgaaagatcgacctgccaagtacatcattgaacatggtattaaacatggtttaatcactgagaatacacatttaattgaaagtacttctggtaatttaggcattgcgttggcaatgatagctaaaatcaagggattaaaactcacgtgtgttgttgatcctaaaatatcaccaacaaatttgaaaattattaaaagttatggtgccaatgtagaaatggttgaagaacctgatgcacatgggggttatttaatgactcgtattgcaaaggtgcaagaactgttagccactattgacgatgcatattggattaatcaatatgcgaatgagttaaattggcaatcccattatcatggtgcaggcacagagattgttgaaacaattaagcaacctatagattattttgtcgcgccagtcagcacgacaggtagcattatgggtatgagtagaaaaataaaagaagtgcatccaaacgcacaaattgttgctgttgatgcgaaagggtcagtcatttttggtgacaaacctattaatagagaattacctggtatcggtgctagtcgtgtacccgaaatattgaatagatcagaaattaatcaagtgatccatgtagatgattatcaatctgctttgggctgtcgaaaactgattgattatgaaggcatatttgccggaggttcaacaggttcgattattgcagcgattgagcagttgataacgtcaattgaagaaggtgcaacaattgtcacgattttaccagatcgaggcgatcgttacttagatttagtttattcagatacatggttagaaaaaatgaaatcaagacaaggagttaaatcagaatgaatagagagatgttgtatttaaatagatcagatattgaacaagcgggaggtaatcattcacaagtttatgtggacgcattaacagaagcattaacagcccatgcgcacaatgattttgtacaaccgcttaagccgtatttaagacaggatcctgaaaatggacacatcgcagatcgaattattgcaatgccaagtcatatcggtggtgaacacgcaatttcaggtattaagtggataggtagtaagcacgacaatccatcgaaacgtaatatggagcgtgcaagtggcgtcattattttgaatgatccagaaacgaattatccaattgcagttatggaagcaagtttaattagtagtatgcgtactgcagcagtttcagtgattgcagcaaagcatttggctaaaaaaggatttaaagacttaacaatcattggatgcgggctaatcggagacaagcaattacaaagtatgttagagcaattcgatcatattgaacgcgtgtttgtttacgatcaattctctgaagcatgtgcacgctttgttgatagatggcaacaacagcgtccggaaattaattttattgcgacagaaaatgctaaagaagcagtatcaaatggtgaagtagtcattacatgtaccgtaacggatcaaccatacattgaatatgattggttacaaaagggtgcatttattagcaacatttctatcatggatgtgcataaagaagtctttattaaagctgacaaagtcgtagtagatgactggtcacaatgtaatcgagaaaagaaaactattaaccaattggtgttagaaggtaaattcagcaaagaagctcttcatgctgaactaggacaacttgtgacaggtgacataccaggacgtgaagacgatgatgagatcatattacttaatccgatgggtatggctatcgaagatatttcaagtgcttattttatttatcaacaggcacaacaacaaaatattgggacaacattgaacctatattaagaatgcgaggtgtctgaacattgcagaatcatacagcagtcaatacagcacaagcgataatattaagagatttagttgatgcattattatttgaagatatagccggaattgtatcgaatagtgagattactaaagaaaacggacaaacgcttttgatatacgaacgtgaaacacaacaaataaagatacctgtttattttagtgctttaaatatgtttcgttacgaaagttcacaaccaattacgatagagggaagggtgtctaagcaacctttaacggcagctgaattttggcaaacaattgctaatatgaattgtgatctaagtcatgaatgggaagtggctcgcgttgaagaaggactgactactgctgccacacagcttgctaaacaattatcagaattagatttagcgtcacatccttttgtgatgtcagagcagtttgcaagtttaaaagatcgtccatttcatccattagctaaagaaaaaagaggattaagagaagcggattatcaagtgtatcaagctgaattaaatcaatcatttcctttaatggttgcagcagttaaaaagacacatatgattcatggcgatactgcaaatatcgatgaattagaaaatttgacagtacctataaaagaacaagcgacagacatgttaaatgatcaagggttatcaatagatgactatgtactatttccggtacatccttggcaatatcagcatattctgccgaacgtctttgcgaaagagattagtgaaaagttggttgtactattaccgttaaaatttggagattatctgtcgtcttcaagtatgcgttcattaattgatattggcgcaccgtataaccatgtcaaagtaccatttgcaatgcagtcattaggcgcattaaggctaacgcctacgcgttacatgaaaaacggagaacaagcagaacaattattacgtcagcttatagaaaaagatgaagcactagctaagtatgtcatggtttgtgatgaaacagcttggtggtcatatatgggtcaagataatgatattttcaaagatcaattaggtcatctaactgttcagctaagaaagtatcccgaagtgctagccaaaaatgatacgcaacagctagtgtcaatggcagcactcgcggcaaatgatcgcactttatatcaaatgatttgtggaaaagataatatttctaaaaatgatgtcatgacgttatttgaagatatcgcgcaagtctttttaaaggtaacactatcatttatgcaatacggcgcattaccagagttgcatggtcaaaatatattgttgtcatttgaagatggacgtgtacaaaaatgcgtgttacgtgatcatgatactgtcagaatttataaaccatggctaacagcacatcagctttcattgccgaagtatgtcgtcagagaagatacacctaatacgctaattaatgaggatttggaaacattctttgcttattttcaaacattagctgtatcggtaaatctatatgccattattgatgcaattcaagatttatttggtgtaagtgagcatgaacttatgtcgttgttaaaacaaattttaaaaaatgaagtggcaactatttcctgggttacaactgatcagctagctgtcagacacattttatttgataaacagacgtggccattcaaacaaattttattaccattgctatatcaacgtgatagtggtggaggtagtatgccttcaggtttaactaccgtaccaaatccaatggtgacatatgattaatcagtctatatggcgcagtaactttcgcattttatggctcagtcagtttatagcgattgctggactgacagtacttgtgccattattgccaatttatatggcatcactacaaaatctatcagtcgtagaaatacagttgtggagtggtatagcgattgctgctccagctgtaacgacgatgatagcttcgccgatatgggggaagctaggtgataagatcagccgaaaatggatggtgttaagagcgttacttggtttggcggtatgcttatttttaatggcattgtgtacgacaccattacagtttgtacttgtgaggttattgcagggactatttggtggtgttgttgatgcatcaagtgcgtttgcgagtgcagaggcgccagctgaagatcgtggaaaggtattaggaagactgcaaagttcagtcagcgcagggtctcttgtggggccattaattggcggtgttacagcttcgatattaggttttagtgcgttactgatgagtattgccgttattacttttattgtctgtattttcggtgcattaaaattgattgaaacgacacatatgccaaaatcacaaacaccaaatattaataaaggtattcgccgttcatttcaatgtctattatgcacacaacaaacatgtcgatttattatcgttggcgttttagcaaactttgctatgtatggcatgctaactgcattatcaccacttgcttcatcagtgaatcatacagcgatagatgaccgtagtgtgattggatttttacagtccgcattttggacggcttcgatattaagcgcgcctttatggggacgctttaatgataaatcatatgttaaatcagtatatatatttgccacgattgcatgtggttgtagtgcgatactgcaaggtttagcgacgaatatagagtttttaatggctgcaagaatacttcaaggattaacatatagtgcattgattcaaagtgtcatgtttgttgtcgtgaatgcgtgtcatcaacaacttaaaggcacatttgttggaacgacgaacagtatgttagttgttggtcaaattattggcagtcttagtggcgctgccattacaagttatactacaccagctactacgtttatcgttatgggcgtagtatttgcagtaagtagtttatttttaatttgttcaaccatcactaatcaaatcaacgatcacacattaatgaaattatgggagttgaaacaaaaaagtgcaaaataaagaattaatacaacatgcagcgtatgcggctatcgaacgcattttaaatgaatattttagagaagaaaatttatatcaagtaccacctcaaaatcatcaatggtctatacaattatcagagctcgaaactttaacgggtgaatttcgctattggtctgcgatggggcatcatatgtatcatccagaggtatggcttatcgatggaaaaagtaaaaaaataacaacttataaagaagcaattgcgcgtattttgcaacatatggctcaaagtgcagataatcaaacggcagtgcaacaacatatggcgcaaattatgtctgacatcgataatagcattcatcgcacggcacgttatttgcaaagtaacacaatagactacgtagaggatcgttatatcgtttcagaacaatctttatacttaggtcatccatttcatccgactcctaagagtgcaagtgggttttcagaagcagatttagagaaatatgcacccgaatgtcatacatcattccaattgcattatttagctgtgcatcaagatgttctgctcacgcgctatgtagaaggtaaagaagatcaggttgagaaagtgttgtatcaattagcagacatagatatatcagagatacccaaagattttattttattaccaacacatccttatcaaatcaatgtgttgcgacagcatccacagtatatgcaatatagtgaacaaggtttaataaaagaccttggcgtttccggtgattcagtgtacccgacgtcttcggttagaactgtattttcaaaagcattaaacatttatttaaaattaccgatacacgttaaaatcactaattttatacgtacgaatgaccttgaacagattgaacggacaattgatgccgcgcaagttatcgcatcagtcaaagatgaggttgaaacaccccattttaaattgatgtttgaagaaggatatcgtgcattgttaccgaatccattagggcaaacagttgaacctgaaatggatttattaacaaatagtgccatgattgttcgtgaagggataccgaattaccatgctgataaagatattcatgtattggcgtcattatttgaaacgatgcctgattcaccgatgtctaagttatcacaagtgattgagcaaagtggtttagcaccagaagcatggcttgaatgttatttgaatcgtacattattgccgatattaaagctgtttagtaacacaggcattagtctagaagcacatgtacaaaatacattaattgaattaaaagatggcatacccgacgtatgctttgtcagagatcttgaaggcatttgtctatctagaacgattgctactgaaaaacagcttgtgccaaatgttgtggcagcatcaagccctgttgtatatgcacatgatgaagcatggcatcgtcttaaatattacgttgtagtaaatcacttaggacatttagtatcaactattggtaaagcgactagaaatgaagttgtgttatggcaacttgtagcgcatcgtcttatgacttggaaaaaagaatacgcgaataacgcagtatttgttgactgtgtagaagatttatatcaaacgccgaccattgcggctaaagcgaatttgatgagtaaattgaatgattgtggtgcaaaccctatttatacacatataccaaatccaatttgtcataacaaggaggtatcgtattgtgaatcaaacaattcttaatcgtgtaaagactagagtgatgcaccaactggtatcatcacttatttatgagaatattgttgtgtataaagcgtcatatcaagacggtgtcggtcattttacaatagaaggacatgattcagagtatcgttttactgctgaaaagacacatagctttgatcgtatacgtatcacatcaccaattgagcgtgtcgtaggagatgaggcagatacaacaacagactatacacaattattgagagaggttgtatttacatttcctaaaaatgatgaaaagctagaacaatttattgtcgagttattacagacagaattaaaagatacgcaaagtatgcagtatcgagaatcaaacccaccagcaacacctgagacatttaacgactatgaattttatgcgatggaagggcatcagtatcatccaagttacaaatcacgtttaggatttacgttgagtgataatttgaaatttggtcctgattttgtaccaaacgttaaactgcagtggttagctatcgacaaagataaagtagaaacgacggtatcaagaaatgttgtagttaacgaaatgttacgtcaacaagttggcgataagacttatgaacattttgtacagcaaattgaagcatctggcaaacatgtaaatgatgttgagatgatacctgtacacccatggcagtttgaacatgtcatccaagttgatttggctgaagaaaggcttaatggcacagtactatggttaggggaaagtgatgagctatatcaccctcaacaatcgattcgtacgatgtcgccaatagacacgacaaaatattatttaaaggtaccaataagtataacgaacacttcaacgaaacgagtgttggcgcctcatacaattgaaaatgcagcgcaaattacggattggttaaagcagatacagcaacaagatatgtatttaaaagatgaattaaagacagtttttctaggggaagtcttaggacagtcttatttaaatacacaactttcgccttataaacaaactcaagtttatggtgcgttaggtgttatatggcgtgaaaatatatatcatatgttaatcgatgaagaggatgcgataccatttaatgcactttatgcaagtgataaggatggtgtaccattcattgaaaattggattaaacaatatggttctgaagcttggacaaagcaatttttagctgtagcgattcgtccaatgattcatatgctttattatcacggtattgcctttgaatcgcatgcacaaaatatgatgctcattcatgaaaatggttggcctacacgtattgccttaaaagatttccatgatggtgttcgttttaagcgtgagcatttaagtgaagctgcttcacacctgacattaaagccaatgccagaagcacataaaaaagtgaatagtaattcatttattgaaacagatgacgaacgtttagtacgcgactttttacatgatgcatttttctttattaatatcgccgaaatcatcttatttattgaaaagcaatatggtatcgatgaggagctgcaatggcaatgggttaaaggcatcatcgaggcgtatcaagaagcatttccagagttgaataactatcaacatttcgatttgtttgaacctacgattcaagttgaaaagttaacgacacgtcgattattaagtgactccgagttaagaattcatcatgttacaaatccattaggtgtaggaggtatcaatgatgcaacaactatctctgaaacatagattaaacaatggtgattcagtttatggcatttttaattctataccggacccattgatgatcgaggttatcgcagcaagcgggtatgactttgttgtgattgatacagaacacgtggcgattaatgatgagacactagcgcatttaattcgtgcagctgaagcagcgcatattataccaattgtacgtgtcactgcagtgatagatagagatatcattaaagtgttggatatgggtgcgagaggtattattgtgccacacgttaaagatcgtgagacagttgagcatattgtgaaattaagtcgttattacccgcaaggattaagaagtttgaatggtggtcgcatggcaagatttggacgtacaccattacttgatgcaatggagatggctaatgagcatattatggtgattgccatgatagaagatgttgaaggggttatggccattgacgatatagcacaagtcgaaggtttagacatgatagtcgaaggtgccgcagatttatcgcagtcacttggcataccatggcaaacgcgtgatgatcaagtaacatcacatgttcaacatatttttgaagttgtgaatgcacatggtaaacatttttgtgcattaccacgtgaagatgaagatattgcaaaatggcaggcacaaggtgtacaaacatttattttaggtgatgatcgcggaaaaatatatcgccatttaagtgcatctctagcgacgtctaaacagaaaggggatgaaggctaatgcgtatagttcaacctgttattgaacaattaaaagcacaatctcatccagtttgtcattatatctatgatttagtcggactggaacatcatttgcaacatattacatcgtcattgccgagtaattgtcaaatgtactatgcaatgaaagcaaatagtgaacgaaaaatcctagatacaattagtcagtatgttgaaggattcgaagttgcatctcaaggtgaaatagcaaaaggtcttgcttttaaaccagcaaatcatattatttttggtggccctggtaagacagacgaggaactaagatatgcagtaagtgaaggtgttcagcgtattcatgttgaaagtatgcatgaattacaacggctaaatgccatcttagaagatgaagataagacacaacacattttattgcgtgttaatttagcaggaccatttcccaatgcaacgttgcatatggcaggacgcccaacacaatttggtatttctgaagacgaagttgatgatgtcattgaagctgcgctcgcaatgccaaagattcatctagatggatttcattttcattctatttctaacaatttagactcgaatttacatgtcgatgtagtgaaactttattttaaaaaagcaaaggcatggtctgaaaaacatcgatttccactcaaacatatcaatcttggtggtggcataggcgttaactatgcagatttaactaaccaatttgaatgggataattttgtagaacgttttaaaacacttatcgttgagcaagaaatggaagatgtgacattgaactttgaatgtgggcgctttattgtggcacatattggttactatgtgacagaagtgctagacattaagaaagtacatggtgcttggtatgccatattaagaggaggtacgcaacaatttagactgccggtatcttggcaacataaccatccttttgacatttatcgctataaggacaatccatattcatttgaaaaagtttcaatttcgagacaggacacaacgttagtcggtcaattatgtacaccgaaagatgtctttgctagagaagtacagatagacgcaatcagtacaggcgacgttattgttttcaaatatgcaggtgcatacggatggtctatttcacatcacgatttcttaagccatccacatcctgaatttatttatttaacacaaacaaaggaggatgaataactattgaatcatattcatgaacatttaaaattggtaccagtagataagattgatcttcacgaaacattcgaacctttaagattggaaaaaacgaaaagtagtattgaagcagatgattttatacgtcatcctattttagtgacagcgatgcaacatggtagatatatggttatagatggtgtgcatcggtatacaagtttgaaagcgttaggatgtaagaaagttccagtgcaagaaatccatgaaacacaatattcaattagtacatggcaacataaagttccatttggtgtgtggtgggaaacgttacaacaagaacatcgcttgccatggactactgagacaagacaagaagcgccatttattacaatgtgtcatggtgatacagaacaatatttgtatacaaaagatttaggcgaagcacattttcaagtatgggaaaaggttgtcgcaagttatagtggttgttgttctgtagagagaattgcacaaggtacatatccttgtctttctcaacaagatgtactcatgaagtatcagccattgagttataaggaaattgaagcggttgttcataaaggggaaactgtgccagcaggtgtgacacgctttaatatttcaggacgatgtcttaatcttcaagtaccactggcattacttaaacaagatgatgatgttgaacaactgcgcaattggaagcagtttttagcagataagtttgccaatatgagatgctatactgaaaaagtatacttggtggagcaatagttttactgtgatgttgagggaaatatgatgatttagcgtattgatagcgaaaatataataaaacaatatagtgtggagaacttttgatattttataaatattgaagttctccatttttgtattttgcatataaaaattaaataaaataaggtatattaaggtaaagtataaattttaaataaatggggaatgagtatgagctcaattataggaaaaatagcaatttggataggcatcgtagctcaaatatattttagtgtcgtttttgttaggatgatatctattaatattgctggaggatctgattacgaaacaatttttttattaggattaatattggctcttttcactgttttaccaaccatctttactgcgatttatatggaaagttactctgtaatcggaggtgcactttttattgtttatgctattattgcactgtgtttatataatttcctttcgtcaattttatggctgattggtggtattttgctgatttggaataaatactcaaaagatgaatcgacagacgaaaatgaaaaagttgatattgaaagtacagagaatcaatttgaatctaaagataaaatcactaaagaataaagagaatatttaaggtaaagtataaattttaaataaatggggaatagacatggaaaaaaatgtagaaaaatcattcataaagataggtttatattttcaaatagcttatatagtactcatggctataactttatgtgggtttgtaatttgctatggactaattttcggccttttctatttattatcaggtagcagagctgattatttaatagtaacaatagttatatcggcaataatttctatatttgtaattatactttcaatcgtacctgtcatcgtattggcatctgacttatttaaagaaaggatttcaaaaggtgtcatattaattgtattggctattatcgctttagtattatgcaactttgtatctgcaatactctggtttgtttcagccatatctattttaggtagaaaaaaattagtagctgcagcagatactaccactattcaaaaaagtaaagggaacgcaaatcaagcatcacataaagacacgtgtaaaaaggaacttgatagtcaagacatgatggaacatcctgaggttaaaaatcccacgactaaaaaccttgaaggatttaacgaagaaatacataaagatgaagctacaactaaagttgtcagtgataacacggaaccgcctattgaatcaaaagaccatgtctcgaaaaaagattgatgacaaactaatcgagagacttaaaaaaataatattcaacataagaacttttaaaacgacatttaaacgcattgccaatcactaatggtagtgcgtttaactataccttaaatatctgaatattttgttaaatggagctacctttgttgtactattcaaatgaagaggagtaaaatgtaattaaaggaaagaaatttgaggagtgatctttatgacaaacaacaaagtagcattagtaactggcggagcacaagggattggttttaaaattgcagaacgtttagtggaagatggtttcaaagtagcagttgttgatttcaatgaagaaggggcaaaagcagctgcacttaaattatcaagtgatggtacaaaagctattgctatcaaagcagatgtatcaaaccgtgatgatgtatttaacgcagtaagacaaactgccgcgcaatttggcgatttccatgtcatggttaacaatgccggccttggaccaacaacaccaatcgatacaattactgaagaacagtttaaaacagtatatggcgtgaacgttgcaggtgtgctatggggtattcaagccgcacatgaacaatttaaaaaattcaatcatggcggtaaaattatcaatgcaacatctcaagcaggcgttgagggtaacccaggcttgtctttatattgcagtacaaaattcgcagtgcgaggtttaacacaagtagccgcacaagatttagcgtctgaaggtattactgtgaatgcattcgcacctggtatcgttcaaacaccaatgatggaaagtatcgcagtggcaacagccgaagaagcaggtaaacctgaagcatggggttgggaacaatttacaagtcagattgctttgggcagagtttctcaaccagaagatgtttcaaatgtagtgagcttcttagctggtaaagactctgattacattactggacaaacaattattgtagatggtggtatgagattccgttaataatcatccactaatgataaataaatccttattgttaagtttaatcacttagcagtaaggattttttagtgcacttagaagggagtgtattggtagaaaattaataagcgaagttcttaagtgagttatgatgtcacagtctaatgcatcagttgaaagcattattagtattaacacacccaagatattataaaacatcacaaaaacaccactatctaatttatctcaataaaaattcacaaagttatctcattttatttttataaataaaaaatatcgataaaaagcttacaatactttatgtttttatgatatatttttaatgtataaatgaggtggaagatttggaaagagttttgataactggtggggctggttttattgggtcgcatttagtagatgatttacaacaagattatgatgtttatgttctagataactatagaacaggtaaacgagaaaatattaaaagtttggctgacgatcatgtgtttgaattagatattcgtgaatatgatgcagttgaacaaatcatgaagacatatcaatttgattatgttattcatttagcagcattagttagtgttgctgagtcggttgagaaacctatcttatctcaagaaataaacgtcgtagcaacattaagattgttagaaatcattaaaaaatataataatcatataaaacgttttatctttgcttcgtcagcagctgtttatggtgatcttcctgatttgcctaaaagtgatcaatcattaatcttaccattatcaccatatgcaatagataaatattacggcgaacggacgacattaaattattgttcgttatataacataccaacagcggttgttaaattttttaatgtatttgggccaagacaggatcctaagtcacaatattcaggtgtgatttcaaagatgttcgattcatttgagcataacaagccatttacattttttggtgacggactgcaaactagagattttgtatatgtatatgatgttgttcaatctgtacgcttaattatggaacacaaagatgcaattggacacggttataacattggtacaggcacttttactaatttattagaggtttatcgtattattggtgaattatatggaaaatcagtcgagcatgaatttaaagaagcacgaaaaggagatattaagcattcttatgcagatatttctaacttaaaggcattaggatttgttcctaaatatacagtagaaacaggtttaaaggattactttaattttgaggtagataatattgaagaagttacagctaaagaagtggaaatgtcgtgaaaatgacattgaagctgtccataataataagggttatgcctatcaaagaaaattagacaaactagaagaagtgagaaaaagctattacccaattaaacgtgcgattgacttaattttaagcattgttttattatttttaactttaccgattatggttatattcgccattgctatcgtcatagattcgccaggaaaccctatttatagtcaggttagagttgggaagatgggtaaattaattaaaatatacaaattacgttcgatgtgcaaaaacgcagagaaaaacggtgcgcaatgggctgataaagatgatgatcgtataacaaatgtcgggaagtttattcgtaaaacacgcattgatgaattaccacaactaattaatgttgttaaaggggaaatgagttttattggaccacgcccggaacgtccggaatttgtagaattatttagttcagaagtgataggtttcgagcaaagatgtcttgttacaccagggttaacaggacttgcgcaaattcaaggtggatatgacttaacaccgcaacaaaaactgaaatatgacatgaaatatatacataaaggtagtttaatgatggaactatatatatcaattagaacattgatggttgttattacaggggaaggctcaaggtagtcttaatttacttaataagttcaaataaaagttatattttaaagattgtgaccaattgttacagtataacgaggaatcccttgagacagtatcaaatggcattaagaaatatgtgccatcattgatttgcatggctataaatactattcatctgatgagatagccatgttaagaaattgaaagtatagcattaaaggggtttgtaacagttgaaaattatatattgtattactaaagcagacaatggtggtgcacaaacacatctcattcaactcgccaaccatttttgcgtacacaatgatgtttatgtcattgtaggcaatcatggaccaatgattgaacaactagatgcaagagttaatgtaattattatcgaacatttagtaggtccaattgactttaaacaagatattttagctgtcaaagtgttagcacagttattctcgaaaattaaacctgatgttatccatttacattcttccaaagctggaacggtcggacgaattgcgaagttcatttcgaaatcgaaagacacacgtatagtttttactgcacatggatgggcttttacagagggtgttaaaccagctaaaaaatttctatatttagttatcgaaaaattaatgtcacttattacagatagcattatttgtgtttcagatttcgataaacagttagcgttaaaatatcgatttaatcgattgaaattaaccacaatacataatggtattgcagatgttcccgctgttaagcaaacgctaaaaagccaatcacataacaatattggcgaagtagttggaatgttgcctaataaacaagatttacagattaatgccccgacaaagcatcaatttgttatgattgcaagatttgcttatccaaaattgccacaaaatctaatcgcggcaatagagatattgaaattacataacagtaatcatgcgcattttacatttataggcgatggacctacattaaatgattgtcagcaacaagttgtacaagctgggttagaaaatgatgtcacatttttgggcaatgtcattaatgcgagtcatttattatcacaatacgatacgtttattttaataagtaagcatgaaggtttgccaattagcattatagaagctatggctacaggtttgcctgttatagccagtcatgttggcggtatttcagaattagtagctgataatggtatatgtatgatgaacaaccaacccgaaactattgctaaagtcctggaaaaatatttaatagacagtgattacatcaaaatgagtaatcaatctagaaaacgttatttagaatgttttactgaggagaaaatgattaaagaagtggaagacgtttataatggaaaatcaacacaatagtaaattactaacattgttacttatcggtttagcggtttttattcagcaatcttcggttattgccggtgtgaatgtttctatagctgactttatcacattactaatattagtttatttactgtttttcgctaaccatttattaaaggcaaatcattttttacagtttttcattattttgtatacatatcgtatgattattacgctttgtttgctattttttgatgatttgatatttattacggttaaggaagttcttgcatctacagttaaatatgcatttgtagtcatttatttctatttagggatgatcatctttaagttaggtaatagcaaaaaagtgatcgttacctcttatattataagcagtgtgactataggtctattttgtattatagctggtttgaacaagtcccctttactaatgaaattgttatattttgatgaaatacgttcaaaaggattaatgaatgaccctaactatttcgcgatgacacagattattacattggtacttgcttacaagtatattcataattacatattcaaggtccttgcatgtggtattttgctatggtctttaactacaacggggtctaagactgcgtttatcatattaatcgtcttagccatttatttctttattaaaaagttatttagtagaaatgcggtaagtgttgtgagtatgtcagtgattatgctgatattactttgttttaccttttataatatcaactactatttattccaattaagcgaccttgatgccttaccgtcattagatcgaatggcgtctatttttgaagagggctttgcatcattaaatgatagtgggtctgagcgaagtgttgtatggataaatgccatttcagtaattaaatatacactaggttttggtgtcggattagtggattatgtacatattggctcgcaaattaatggtattttacttgttgcccataatacatatttgcagatctttgcggaatggggcattttattcggtgcattatttatcatatttatgctttatttactgtttgaattatttagatttaacatttctgggaaaaatgtaacagcaattgttgtaatgttgacgatgctgatttactttttaacagtatcatttaataactcaagatatgtcgcttttattttaggaattatcgtctttattgttcaatatgaaaagatggaaagggatcgtaatgaagagtgattcactaaaagaaaatattatttatcaagggctataccaattgattagaacgatgacaccactgattacaatacccattatttcacgtgcatttggtcccagtggtgtgggtattgtttcattttctttcaatatcgtgcaatactttttgatgattgcaagtgttggcgttcagttatattttaatagagttatcgcgaagtccgttaacgacaaacggcaattgtcacagcagttttgggatatctttgtcagtaaattatttttagcgttaacagtttttgcgatgtatatggtcgtaattactatatttattgatgattactatcttattttcctactacaaggaatctatattataggtgcagcactcgatatttcatggttttatgctggaactgaaaagtttaaaattcctagcctcagtaatattgttgcgtctggtattgtattaagtgtagttgttatttttgtcaaagatcaatcagatttatcattgtatgtatttactattgctattgtgacggtattaaaccaattacctttgtttatctatttaaaacgatacattagctttgtttcggttaattggatacacgtctggcaattgtttcgttcgtcattagcatacttattaccaaatggacagctcaacttatatactagtatttcttgcgttgttcttggtttagtaggtacataccaacaagttggtatcttttctaacgcatttaatattttaacggtcgcaatcataatgattaatacatttgatcttgtaatgattccgcgtattaccaaaatgtctatccagcaatcacatagtttaactaaaacgttagctaataatatgaatattcaattgatattaacaatacctatggtctttggtttaattgcaattatgccatcattttatttatggttctttggtgaggaattcgcatcaactgtcccattgatgaccattttagcgatacttgtattaatcattcctttaaatatgttgataagcaggcaatatttattaatagtgaataaaataagattatataatgcgtcaattactattggtgcagtgataaacctagtattatgtattattttgatatatttttatggaatttacggtgctgctattgcgcgtttaattacagagtttttcttgctcatttggcgatttattgatattactaaaatcaatgtgaagttgaatattgtaagtacgattcaatgtgtcattgctgctgttatgatgtttattgtgcttggtgtggtcaatcattatttgccccctacaatgtacgctacgctgctattaattgcgattggtatagtagtttatcttttattaatgatgactatgaaaaatcaatacgtatggcaaatattgaggcatcttcgacataaaacaatttaagtaccggtaatgctatactttagaaaattaagattaagaagaaaaggcaatttcttattgaaaaatggaagttgtcttttttaattctctttaaaagcgggaaacaaaagcagttaaatgcctttttgcattcaatattaaatattatatcaatttcgaatatttaaattttatataattggatataacaaataaataataattattgcaaaacacacccaaaattaattattataaaagtatattcataaaaggaggaatatacttatggcatttaaattaccaaatttaccatatgcatatgatgcattggaaccatatatagatcaaagaacaatggagtttcatcacgacaaacatcacaatacgtacgtgacgaaattaaacgcaacagttgaaggaacagagttagagcatcaatcactagcggatatgattgctaacttagacaaggtaccggaagcgatgaggatgtcagtccgtaataatggcggtggtcattttaaccattcattattctgggaaatactatcacctaattctgaagaaaaaggtggcgtaatagatgacatcaaagcgcagtggggcactttagatgaatttaaaaatgaatttgcaaataaagcaacaacattatttggatcaggttggacttggttagttgttaatgatggcaaattagaaattgtgacaacgccaaaccaagataatccattaacagaaggcaaaacaccaatcttactatttgatgtttgggagcatgcctactatctgaaatatcaaaataaacgtccagactatatgactgcattttggaacattgttaactggaaaaaagttgatgaattataccaagcagcaaaataatataacttaatataattgaggtggagcatctacaaggtgttccacttttttgtacttaatatctttacttatttgtttttgtgtaatgggatagcacgtaaaagtggaaaaataataagataaatttcaactcgaaataccttattattgttgactataacgatgacctaaatattatatacattagacaacactattaattaatcaacatattgacattaaataaattgacaaaataagtaattattgtgaatctaaagtgaaatttttataaaaaaatgtaatgattcaaaaattttgttgcatttcttttgtaatcgtatgataatgtaaatgtaatcaaattgtaatataaggggacaagacaatgaaaaaattagcaacagtaggttctttaattgtaacaagcactttagtattctcaagtatgccttttcaaaatgcgcatgccgacacaacttcaatgaatgtgtcgaataaacaaagccaaaatgtacaaaatcatcgtccttatggcggagtagtaccacaaggaatgacgcaagcacaatatactgaattagagaaagctttaccccaattaagcgctggcagtaatatgcaagactataatatgaaattgtatgatgcgacgcaaaatattgctgataaatacaatgtgataattacaactaatgtaggggtatttaaaccacatgctgttagagatatgaatggccatgcgttacctttaacaaaagatggcaatttttatcaaacgaatgtagatgcaaatggtgttaatcatggtggtagtgaaatggtgcaaaataaaacaggtcatatgagtcaacaaggccatatgaatcagaacacacatgaaccaacagccacacatgcaacaaggtcatatgcaatcatcaaaccatcaaatgatgagtccaaaagcaaatatgcattcatcaaatcatcaaatgaaccaaagtaacaaaaaagttttaccagctgctggtgaaagtatgacatcaagtattcttactgcaagtattgccgcactactattagtatctgggttattcttagcatttagacgacgttcaacaaataaataaacataatacgattaataatagaaaaatcgtgtgattatctgagcgagcctaggacataaatcaatgtcctaggctcgctaatgttatattggcagtagttgactgaatgaaattgcgcttgtaacaagcttttccatttcttaccaactccctaaatagtcatcaaaaaatttcttatattttaataatttttaataatccgattgtcttatacgtgtcagtgttaattcagatatttcctgtggaatataccacttattaatcataattggataaggtgtttgtgcgtacagtgtttcaataatcagccaacaatgtgtatcaccatcaaacacgtgactatgatttttgaagtggggcgctttggtaatagacatttttaaatctgattgatatgcattgctataaatcgtttgctcaacgaatgtcttcatgtcgtcttcgttttgtgtattcactttaaatgtgtcaatgacatttaacggtataaaggtaaagcaaaatgcatcagcttgcttagaatgattgtcctttttttgataatagcgttccattgcaatgacggcagaaggatggtttgcaaacaaatgatttgtatattcactttctaaatcaacacgataattaattgatgacatagatacgcgagctagcaatatttgatcaagtggatgcttaaattgatccatacttgaagcgtgttgggcatttgtttgtggaataacaaagtgtcccttccctcttgtactctctacgatgccatcttcggctaacaattttatagcttggcgcaaagtcatacgactgacatcaaagcgcgcacaaagttccttttcagtaggtaatgcatggccactcggatattttcctatttgaatttctttatataacgtattataaatcgttaaaaattttggttgtgtttgcgtcacgtagacaacctccataaagttacttaatcactctcatcatacaataatttttactcaaattggaaaaattataaaaattaaatatagataggctttgaaaattagttttatacaaggttagtagctgtaactgtaaaatgttcttaatattgtcaaaatgtaatgcttgaaagcgcttttaaaaaatattattatatacatggttagacaaatagacaaatcactatacaaatattgggaggaatattttatgaaatcaacaccacacattaaaccaatgaatgacgtcgaaattgcagaaacggttctattgccaggagatccgttaagagctaagttcattgcagaaacttatttggatgatgtggaacagttcaatacagtgcgaaacatgtttggttttaccggaacatataaaggtaaaaaagtttctgtcatgggttcaggtatgggtatgccatctattggcatttactcttatgaattaattcatacatttggttgtaaaaaattaattcgcgttggctcttgtggcgcgatgcaagaaaacattgatttatatgatgtgattattgcacaaggtgcctctactgattcaaattacgttcaacaatatcaattaccaggtcattttgcgccaattgcttcttatcaattattagaaaaagcagttgaaacagcacgtgacaaaggtgtacgtcatcatgtaggtaatgtgttatcaagtgatattttctataacgcggatacaacagcgagtgaacgttggatgcgtatgggtattttaggtgtagaaatggaatcagctgcattatacatgaatgcaatttacgctggtgtcgaagcattaggtgtgttcacagtgagcgatcatttaattcatgaaacgtcaacaacacctgaggaaagggaacgtgcatttacagatatgattgaaattgcactgtcattggtgtagatgattatgaatgttgaatattctaaaataaagaaagcagtacctattttattattcttatttgtattcagtttggttatagacaactcatttaaattgatttctgtagccattgctgatgacttaaacatatctgtaacgacagtaagttggcaagcgacattagccggtttagtaattggtattggcgctgtagtatacgcttcattatctgatgccattagtatacgcacactatttatttatggcgtgatattaatcattatcggatcaattattggttacattttccaacatcaattcccattacttttagttggacgtattattcaaactgccggtttagctgctgcagagacattatatgtgatatatgttgcaaagtatctttctaaagaggaccagaagacttaccttggcttaagtacgagcagttattccttgtcattagttatcggtacattatcaggtggatttatttctacgtatttacactggacaaatatgtttttaattgcattaatcgtagtatttacgttgccattcctatttaaattattaccaaaagaaaataatacgaataaagctcatttagattttgttggcttaattctagtggcaactattgctacaacagtcatgctgtttattacgaactttaattggttatatatgattggtgccttaattgcgattatcgtttttgcgctatatattaaaaatgcgcaacgtccattagtaaataaatcatttttccaaaataaacgttatgcttcatttttatttatagtatttgtaatgtatgctatccaattgggttatatttttacgttcccattcataatggagcaaatttatcatctgcaactagacacaacatcactgttattagtaccgggttatatagtagcagtcattgttggtgcactaagtggtaaaatcggcgaatatctgaattcaaaacaagcgattatcacagcaattattttaatagcactgagcttgattttacctgcatttgcagtaggtaatcacatttcaatcttcgtcatttctatgatattctttgcaggtagctttgctttaatgtatgcacctttacttaacgaagccattaaaacaatagatcttaatatgacaggtgtggctattggtttttataatttaattattaatgtggcggtatctgtaggtattgcgattgctgcggctctaatcgattttaaagcattaaatttcccaggcaatgatgcattaagttcacatttcggtattattttaattattttaggtttaatgagtattgtcggattagttttattcgtcagcttaaatcgttggacacaatctgaaaaataaatagatataaattcgcgagatatattcgtatttatagtaaaattaaataaagagattatataacacgaggagtagtaagtatgaaatttgagaaatatatagatcacactttattgaagcctgagtcaacacgtacgcaaatcgatcaaatcatcgatgaagcgaaagcatacaattttaaatctgtatgtgtgaatccaacacatgttaaatatgcagcagagcgactagctgattcagaggtgctcgtttgtacggtaataggattcccattaggtgcgtcgacaactgcaacgaaagcatttgaaacagaagatgcaattcaaaatggtgcagatgaaattgacatggtcatcaacatcggcgcattaaaagatggacgttttgatgatgtacaacaagacattgaagcagtggttaaagctgcgaaaggtcacacagtaaaagtgattattgagacggtattgttggaccatgacgaaattgtaaaagcgagtgaattaacaaaagcggctggtgcggacttcgttaaaacttcaacaggttttgcaggtggcggtgcgactgcagaagacgttaaattaatgaaagatacagtaggtgctgatgtagaagtaaaagcatcaggtggcgtacgtaatttagaagatttcaataaaatggttgaagcaggtgcgacacgtattggtgcgagcgcaggtgttcaaattatgcaaggtttagaagcagattcagattactaatatatataaattttgggagtgatagctatgacaagaccatttaatcgtgtacatttaatcgtaatggattcagtaggtattggtgaagcgccagacgcagctgattttaaagatgaaggttcacatactttaagacataccttagaaggtttcgatcaaactttaccaaaccttgaaaagttaggtctagggaacatcgataaattaccagtagtaaatgcagttgaacaaccagaagcatactatactaaattgagtgaagcttcagttggtaaagatacaatgactggtcactgggaaattatgggattaaatattatgcaaccttttaaagtataccctaatggattccctgaagagttaattcaacaaattgaagaaatgacaggtcgtaaagttgttgctaacaaaccggcatcgggtacgcaaattatcgatgagtggggcgagcaccaaatgaaaactggtgacttaattgtttatacaagtgcagacccagtattgcaaattgctgcacatgaagacattatcccattagaagagttatatgatatttgtgaaaaggttcgtgagttgacaaaagaccctaaatatttaattggtcgtattatcgcacgtccatatgttggtgaaccaggaaactttacacgtacatctaatcgacatgactatgcgttaaaaccttttggtaaaactgtcttagatcatttgaaagacggtggttatgatgttattgtcatcggtaaaattaatgacatttatgatggtgaaggtgtaacagaagcggttcgtacgaagagtaacatggacggtatggatcaattgatgaaaattgttaagaaagatttcacaggtattagcttcttaaacttagtagactttgatgcattatacggtcatcgtcgtgataaaccaggttatgcacaagcaattaaagatttcgatgatcgcttgccagaactgtttagcaacttaaaagaagacgatttagtaattattacagcagaccatggtaatgacccgacagcgccaggtacggaccatacgagagaatatatcccagtaattatgtacagtccgaaatttaaaggtggtcatgcactagaaagtgatactacattcagttctatcggtgcaactatagcagataatttcaacgtaacattaccagagttcggtaaaagttatttaaaggaattgaaatagaataaatttagatattataaaaacagcagtgaagttaactataacaatagttttcttcactgctgtttttattataatagagaaacgtaagacggtaggacttcttatttaggagtatcctgatttaatgttaaacaatacgttttcggattgaaccggaaattaaatcgacaattgcgaccattagtactaaaccgattaatataatacctacacggtcccaagaacgtgtttgaatggcaaatatgagtggtgtcccgataccaccagccccaattagccccagtatagaagctgaacgtaagtttagttcaaagcgataaagtatgagtgatagaaaggcaggcataatttgtggtatgactgcaaatacgagtgttttaatcttattcgcaccactggcctttaatgattctacagcactgaaatctagaccttcaatatcttcagctaaaagtttcccaagcatacctacggaatggatacctaaagctaatacacctgaaaatgaacctgggccaacagctttgataaatataagtgccattacaatttctgggaagacacgtataacacttaaaataaatttgctaacacctgaaactgggcgtagctttaccatattatttgcacctagaaatgctaatggaatacagataattgcggcgatgaaagtacctacaacggctatcgcaaaggtttcaagtaaaccacgtaataagtcttcgccatctggtatatagatatagctgatatcaggatggaataatccgctgaatatggattttaagatttctaatgatttacttttaagttctaaacttggtacacctgcaaatgcccagatgataatagctaagacgacaattgcaataagccatcttttaatcaattttcgtttgtgtgcttttgtgtgaacattatattttgctatttcctgtgtcatgcgagatgtgccctcactttcgtactgatgtaatcaatgacgacgacgataactaaagtaaataaaataatcgttgctgtttttggatattgaaataaaccaagtgtttgatcataaaacaatccaataccgccagcgccgactaatccaagcacagctgaagcacgtatatttacttcaaatgcatataatacgtatgacataaatgacgatatggcttgtggtacaacaccgaaaacaatccattttattttattagcgccaacagccgtcattgcttccattggacctggatctatcgtttccaatgattcatataataattttccaataatacagatagttaaaataaacagtgctaatatccctggaatttgaccgattccaaatacagccacaaagattgctgctaataacaaatctggaatagtacgaactatatttaaaataaagcgcgagggtattgaaatccacttttgatgaacgatattgctagcacataataacgcaattggtattgaaacgatgctacctaatactgtacttacgatagccattcgaatggtatctaacattggcgttgtaatttgttgtaaatactcgaaatcaggtggaatcatttgtttgaatagatcacctatttgaggtattcctatcattaaatctccaaaattaaatcccgtataaatgaagctccaaatgataagcacaatgattaacatgaaggtaaaactcgtttttaaagaaacctttttctttaaaagggagtcatactttgtaggtatttctaaaggcatgttagttcactcctagcttttcatcttctttaattgtacgtccatatatttcactaaatacgtcatctgttgcttcagatgcaggaccatcatagacaacttcaccatcacgtaaaccaatgatgcgtgtgccatattcttttgccaagtcaacaaaatgtaaattaattaaaattgtgatgcctaattcttggttgatttttcttaaatcatccataacctgtttcgtagttaatgggtctaatgaagcaactggttcatctgcaagaataatttcagattcttggcatagcgcacgtgcaatagatatacgttgttgttggccacctgataattcatcagagcgttgattatatttatctaagatattgacgcgttctagtgcatccattgccttaattttgtcttcttttgggaataaacctaataccattttccaagtagggtgataacctacacgtccacttagtacatttcgtaatacacttgaccgtttaactaaattaaaatgttggaaaatcatacctatatttcggcgcatttctaataatgctttaccatgggctttagtgattgatttaccttggatgaaaatttcacctgacgtgatatcatgcaaacgatttacagatcttaataacgtggatttcccagcaccagatagtccgacaataactgcaaattcacctttttcaatatttaagttaatatttttcaagcctacatgaccgttaggatagactttactgacgtttttaaattcgatttgactcatgtttgacacctttctttaataaagaaaagccaaggtaaactgaaatatcatagacattgggtttctgtgtacaaatggtttcaaatgtacagcgacacctttctatatctgtttcagtttagcgcctagcttttcaatattaatctagaatatatctattgaacgaaagcttttaataccaaattcgctaatgattcatttgttaaataatgattatttcatatctttaactaatttttcgtactctcttacaatgtcgaaatttgaatctttcgtttctgtgtatccttcatgtgaataaacttcgctaataattttgtgaccttcttttgatttagcaatgtctataaaagcttttttcaatttttcttgaaaatctttatccatatctggtcttacagaaattgtgtcattcggaatagcttgtgttaattttaaaattcgtgtgtctttaaatacatttggttggtcttttttcacagtattacgtgcatcgttaaatacagccgcagcatctacatctccatttaataatgagataactgcttggtcatgacctttaacattcacaattttcatatctttagttgcattaatacctgcttcgttttttaacatcgcaagtgggaatgtatatccagcagttgatgttacatcttgtaaggcaattttcttaccttttaaatctttcaagcttttaatttttgagtcttttttaacaagaatttctgatttataactatctacaagttctttacttgctgaaccatcttcttttacaccgaaacgttgtgcttgtaataataaatcagctgctttttgatcatgtgctaatgtgtatgccgttggtggtaagaaaccaacatcaacttttttagacttcatagcttcaacaattgtattgtagttagttgatacagacactttaactggaatccctaattctttagatagtaatttttctaatggttttgctttagcttctaatgttccagcattttgcgaaggtacaaattgaacggttaattctttaggtttgtatcctcctgatttagaatccgaatcattactagcgttcttttgattatctaaagaacttgagtttccacatgctgctgcaaaaaaaatgactgctaacattaatacaaataaacacttaaaatttttcatttgataactgtccccttcacattcttaatcgtgtaatatgtatgcaatgaaattacacttatagcgtaccacatttaaatgttaaaaagtattttataaaaatgaattttaataactttctttaagagtttgataagattttgtaaatttttcgttaaattgctcatatgcaacgaatttttatcctataattcaagaacaaatttattttaaaaggagcctcacaaaatgaaaaaaatatataagtcattaactgtctctgcaattgttgcaacggtatcattaagtgctttaccgcaatctttagctataacgcatgaatcgcaacctacaaagcaacagcgaacggtattattcgatcgttctcatggtcaaacagctggtgctgcagattgggttagtgatggtgcattttcagattatgcggattcaatacaaaaacaaggttatgacgttaaagctattgatggtcattcgaacataacagaagcaagtttgaaaagttccaaaatatttgtaattcctgaggctaacattcctttcaaagaatcagaacaggcagcaattgttaaatatgtgaaacaaggtggcaatgttgtctttatttcagatcattacaatgctgaccgaaatttaaatcgtattgattcatcggaggcaatgaatggttatcgacgtggagcatatgaagatatgtcgaaaggtatgaatgcagaagaaaaaagttctactgcaatgcaaggtgtgaaaagttcagattggttatctacaaactttggcgtacgttttcgatataatgcactaggtgatttaaatacgagcaatattgtttcttcaaaagaaagtttcggtattactgaaggtgtgaaatctgtctctatgcatgccggatcgacattagcaattactaatccagagaaagcaaaaggtattgtgtatacaccagaacaattgccagcgaaaagtaaatggtcacatgctgtagatcaaggtatttataatgggggcggtaaagcagaaggcctctatgtagcaatttctaaagttggaaaaggtaaagcagcatttatcggtgattcatcacttgtggaagatagttcgcccaaatatgtaagagaagataatggagaaaagaagaaaacatatgatggttttaaagaacaagacaacggtaagctattaaataatataacggcttggatgtctaaagataatgatgggaaatcacttaaggcgagtagcctaacattagatacaaagactaagttgcttgattttgaacgaccagagcgttcaactgagcctgaaaaagagccatggtcacaaccgccgagtggttataaatggtatgatccaacaacatttaaagcaggtagttatggcagcgaaaaaggcgcagatcctcagccaaacacaccagatgatcatacaccaccaaatcagaacgaaaaagtaacatttgatatcccgcaaaatgtttctgtaaatgagccatttgaaatgacaatacatttaaaaggatttgaagcaaatcaaacacttgaaaatcttagagttggtatttacaaagaaggcggacgtcaaatcggacaattttcaagtaaagataacgattataacccaccaggttacagtactttgccaacagttaaagcagatgaaaacggaaatgtcacaattaaggtcaatgctaaagtacttgaaagtatggaaggttcaaagattcgtttaaaactcggtgacaaaaccttgattacaacagacttcaaataaatatataatagaaataagaaagatgtttgtgattgaaggagtgagtgaggatgtcaaacatagcattttatgtcgtgagtgacgtacatggttatattttcccaacagattttacgagtagaaatcaatatcaacctatgggattgttactagcgaatcatgttatagaacaagacagaaggcagtatgaccaaagttttaaaatagataatggtgattttttgcaagggtcaccattttgtaattacttaatcgcgcatagcggcagtagccagcctttagttgatttttataatcgaatggcattcgactttggtacgcttggtaatcatgaatttaattatggattaccatacttaaaagacactttacgcagactcaattatccagttttgtgcgctaatatatatgaaaatgatagtacattgactgataacggtgtgaagtattttcaggttggagatcaaactgttggtgtgataggtttaacgacacaatttattccccattgggaacaaccagagcatattcagtcacttacgtttcatagtgcttttgaaatacttcaacaatacttacctgaaatgaagcgacatgcagatatcattgtggtttgttaccatggtggatttgaaaaggatttagaaagtggtacgccgaccgaagtattaacgggtgaaaatgaaggatatgccatgttagaagcgttttctaaagatatagatatctttattacgggtcaccaacatcgacaaattgctgaaaggtttaagcaaacggctgtgattcaacctggtacgagaggtacaactgtaggcagagtagtcttgagtactgatgaatatgaaaatctatccgttgaatcatgtgaattacttcctgttatagatgattccacatttactattgatgaagatgaccaacatttacgaaagcagttagaggactggttagattacgaaattactacattgccatatgatatgacgattaatcatgcatttgaggcacgtgtggcaccgcatccttttacaaattttatgaattacgctttattagaaaaaagtgacgcagatgttgcctgtacagctttgtttgattctgctagtggtttcaagcaagtcgtgacgatgcgagatgttattaacaattacccatttccaaatacatttaaagttttagctgtaagtggtgccaaacttaaagaagccattgaacgatcagcagaatattttgacgtgaaaaatgatgaagttagtgtgagcgcagacttccttgaacccaaaccacaacactttaattatgatatatatggtggcgtaagttataccattcatgttggaagaccaaagggacaacgtgtgagcaatatgatgattcaaggtcacgcagttgatttaaagcagacatatacaatttgtgtaaataattatcgtgcagtaggcggtggtcagtatgatatgtatatcgacgcgccagttgtaaaagatattcaagttgaaggcgcacaattacttattgattttttatcaaataataatttgatgcgcatcccgcaagttgttgattttaaagttgaaaagtgacggatatatgtaaaacttacttgattttaatcgggtaagtttttgtttttgtttaaagcgagaaagtattatctttagacgacgtgattgaaatgtcacgtcctgtcaaaatgaatagtttattaaagttgtattttgatagaaatttactgacaccacaaaaattattgaattatttaaaagttgatgaaacatttttgaatcatctagcaggtattaatttaaaactctttaaggattatgttaatgaaaatagagaatataatataacgaatctatataaataaggcaccaatatttaaacctcgagctgaaaagatcatcatttcagttcgaggttttttattttatcctctttgtatgggtattcttttacttgaaatttgttttcctgtttttttattgtaaatttttattacatagtatcctaagttatatcctgacatttgttctccagtatttttagttttttagtaggaacataatggtatttttttgctgttagtggaacatattttttagtgttttgaatttcgtttcatccatttgtaaaactggatactctaatatccggtaatagccggttaaatcgacataggatgtcactagctattccaaaattgtcttttgacgctataacgattgttgggaatcttagcatgtctaacgcagagagactttcacattttatgagtactaatcctgaaattcggctttgggatattttacaaacaaactttaaagctaaagctcttaaagaaaaagtttatattgaatatgacaaaataaaagcaactctttggaatagacgtagtatgcgcgttgaatttaatcctaataagctttcgcatgatgaagtgctttggttaaaacaaaatatcatcagttatttggacgatgttagttttacgagattagatttggcttttgattttgaatttgatttaaatgactattatgcattgtcagataagtcggtaaagaaaactatattttatggacgtaatgtaaaaccagaaacaaaatattttggtgtgcgtaatagtgataggtttattcggatttataataaaaacaagaacgtaaagataatgcagatgttgaaattgattcaacatttctatggcgtgtggaaattgaattaaaacgagatatggttgattgttggaaagattgttttgatgatttgcatattttaaaaccgaatttaaaaatgattgaaaatatacaagaacgagcaatgcttcatttattaactcacgaagaagaggaatggggaaatttagaaagacgtactaaaaataaatatagagataagttgaaaaatatagcgtctattgatttgacagatttaatgaaaatatctttaagaggaaatgaaaaccaattgcaaaaacaaatcgacttttggttgaattaattattataactaaagaactatgttcacttatgctcatctacttaaaataagtatttttttgttggtttttaaaagtagttgaaatgtttataataatattgaaagatatttctgttttccttttgaataataaacttaaaagagaatataaaataatgcttattaaaattaggggtggaaatatgaaaagagatttttttgaaaagtggtcgtttattttaaatttaattttattttgtgcttttttgtttttagtggttctgatgttttataaggatgtcgatttgatttatattttttgtacattattaatatcattattacctttgctaaatattataaaaagatataagaaaaagacggataattaatccgtcttttttttatgaaaagaataggctgggaaataaatcaatgttctatgatctacgaagttatattggcagtaattgactgaacgaaaatgcgcttgtaataagcttttttcaattctagtcaggggccccaacacagagaatttcgaaaagaaattctacaggcaatgcgagttggggcggggccccaacaaagagaaattggattcccaatttctacagacaatgcaagttggggtgggacggcgaaataaattttgcgaaaatatcatttctgtcccactccccagaaaaggttctaccattgtcaaaaaaatgcatctctacatgttagagtaaatattggtcagccaaccaaaataatcaacacgaggagatgctatttaatgtcatctgacacaaacagtttagcacatacgaaatggaattgtaagtaacatattgtctttgcacctaaatacagaagacaagcgatatatggaaaaataaaaaaagatatagggattatattacgtcaattatatgaaagaaaaggtgtagagataattgaagcagaggtatgtaaagatcatatccatatgttagtaagtataccacccaaacttggggtatcatcatttgttggctatttaaaaggaaaagtaatttaatgatatttgatagacatgctaacttaaagtatagatatggaaatagaaagttttggtgtaaaggattttatgtggatacagtaggtagaaataaaaaagtgattgaaaattatattcgtaatcaattacaagaggatatcgttgcagatgaaatttcaatggaagaatatttagatcctttcactggagagaaaaataaaaaaagaaagaaaaaagagtaaacctttaggattgctggaatagtagtgcagttggctgacttgtcagtgcccttttagggctggccagtaaggaaggcttatagccgcagaacaaaccacccgttcacacgggtggtttttatttgtaacatctgttgataggtatcgacaaggaccttttaatgttgtgttttgtgcgatataacaagctttttaggctattaaagaatattcagaattaaatatataattatgaataaattatgtcattgaaaaaattatgattataaaatcattctaaaaacaccgaaataacaatgatttcatgaaaacatttattttaaaatttgatatttgttcaaataatattcgaaattaaacttttttgtatagaattttctttatatcctgagagacatgtactataatgtttgtgaaataattcacaaagtataaaggagtggttgtatatgttaactatacctgaaaaagaaaatcgtggatcgaaagaacaagaagtggcaattatgattgatgctctagctgacaaagggaaaaaagcattagaagcattatctaaaaagtcacaagaagaaattgatcatattgttcatcaaatgagcttagcagctgttgatcaacatatggtgctagcaaaattagcacatgaagaaactggaagaggtatatacgaagataaagcgattaaaaatttatacgcttctgaatatatatggaattcaataaaagacaataagacagtagggattattggtgaagataaagaaaaaggattaacgtatgtagcggaaccaattggtgttatttgtggtgttacgccaacaacaaatcctacgtcgacaactatttttaaagcgatgattgcaattaagacaggaaatccaatcatttttgcattccatccaagtgcacaagaatcgtcgaagcgtgcagcagaagttgtattagaagcggcaatgaaggcaggtgcacctaaagatattattcagtggattgaagtgccttctatcgaagcaacaaaacaattaatgaatcacaaaggtattgcattagttctagcaacaggtggttcgggcatggttaagtctgcatattcaactggcaaaccggcattaggtgtgggaccaggtaacgtgccgtcttacattgaaaaaacagcacacattaaacgtgcagtaaatgatatcattggttcaaaaacatttgataatggtatgatttgtgcttctgaacaagttgtagtcattgataaagaaatttataaagatgttactaatgaatttaaagcacatcaagcatactttgttaaaaaagatgaattacaacgcttagaaaatgcaattatgaatgaacaaaaaacaggtattaagcctgatattgtcggtaaatctgcagttgaaatagctgaattagcaggtatacctgtccccgaaaatacaaaacttatcatagccgaaattagcggtgtaggttcagactatccgttatctcgtgaaaaattatctccagtattagccttagtaaaagcccaatctacaaaacaagcatttcaaatttgtgaagacacactacattttggtggattaggacacacagccgttatccatacagaagatgaaacattacaaaaagattttggactaagaatgaaagcttgtcgtgtacttgtaaatacaccatcagcggttggaggtattggtgatatgtataacgaattgattccgtctttaacattaggttgtggttcctacggtagaaactcaatttcacataatgttagtgcgacagatttattaaacattaaaacgattgctaaacgacgtaataatactcaaattttcaaggtgcctgctcaaatttattttgaagaaaatgcaatcatgagtctaacaacaatggacaagattgaaaaagtgatgattgtctgtgaccctggtatggtagaattcggttatacaaaaacagttgagaatgtattaagacaaaaaacggaacagcctcaaataaaaatatttagcgaagtcgaaccgaacccatcaactaatacagtatataaaggtctggaaatgatggttgatttccaaccggatacaatcattgcacttggtggtggttcagcgatggatgctgcaaaagcaatgtggatgttctttgaacaccctgagacatcattcttcggtgctaaacaaaagttcctagacatcggtaaacgtacttataaaataggcatgcctgaaaatgcgacgttcatttgtatccctacgacatcaggtacaggttcagaagtaacaccatttgcagttatcacagatagtgaaacaaatgtaaaatatccgttggctgattttgctttaacacctgacgttgcaattattgaccctcaatttgtgatgagtgtgccaaaaagcgttacagcagatacaggaatggatgtactaacgcatgcaatggaatcatatgtatctgtaatggcttcagactacacaagaggtttgagtctacaagcgattaaattgacgttcgaatatttaaaatcatctgttgaaaagggtgataaagtttcaagagagaaaatgcataacgcatcaactttggctggtatggcatttgcaaatgcattcttaggcattgcacactcaattgcgcataaaattggtggcgaatatggtattccgcatggtagagcgaatgcgatattactaccgcatattatccgttataatgccaaagacccgcaaaaacatgcattattccctaaatatgagttcttcagagcagatacagattatgcagatattgccaaattcttaggattaaaaggtaatacgacagaagcactcgtagaatcattagctaaagctgtctacgaattaggtcaatcagtcggaattgaaatgaatttgaaatcacaaggtgtgtctgaagaagaattaaatgagtcaattgatagaatggcagagctcgcatttgaagatcaatgtacaactgctaatcctaaagaagcactaatcagtgaaatcaaagatatcattcaaacatcatatgattataagcaataatctatctgataataatcatctaactcacctgaaattacaaaagtaaaaaatgccacataaactttaagtcgataatcattatacggttatcggcttttatttattgccaaatcttcagagagatacaaactagacaatcatttttttaaataaagaaaatattaagattgatactcatttcacaaactattactactttagagtataattatttttaatttcatataaataaaaaggcgaaaataatgcggtttaaaagtaattaattgtttaaacgatatgtaatatgtaaatactatatatataataccaattttaatgaaaatttttaagggaggtaaataatggaaagtacattagaattaacaaaaattaaagaagtattacaaaaaaacttgaagattttaattattttaccgctattatttttaattattagcgctattgttacatttttcgtcttatcacctaaatatcaagctaatactcaaattttagtgaatcaaactaagggtgacaatcctcagtttatggcgcaagaggttcaaagtaatattcaacttgtaaatacgtataaagaaattgttaaaagtcctagaattttagatgaggtgtcaaaggacttaaatgataagtattcaccatctaaattgtcgagtatgttgacaattacaaaccaagaaaatacgcaacttatcaacatccaagttaaaagtggtcataaacaagattcggaaaaaattgcgaatagcttcgctaaagttacaagtaaacaaattccgaagattatgagtgtggataacgtatcaattttatctaaagcagacggtacagcagttaaagtcgcaccaaaaactgtagtgaatctaatcggtgcattctttttaggattagttgtcgcgcttatatatatcttcttcaaagtaattttcgataagcgaattaaagatgaagaagatgtagagaaagaattaggattgcctgtattgggttcaattcaaaaatttaattaaggatggttgctacttatgtcaaaaaaggaaaatacgacaacaacactatttgtatatgaaaaaccaaaatcaacaattagtgaaaagtttcgaggtatacgttcaaacatcatgttttcaaaagcaaatggtgaagtaaagcgcttattggttacttctgaaaagcctggtgcaggtaaaagtacagttgtatcgaatgtagcgattacttatgcacaagcaggctataagacattagttattgatggcgatatgcgtaagccaacacaaaactatatttttaatgagcaaaataataatggactatcaagcttaatcattggtcgaacgactatgtcagaagcaattacgtcgacagaaattgaaaatttagatttgctaacagctggccctgtacctccaaatccatctgagttaattgggtctgaaaggttcaaagaattagttgatctgtttaataaacgttacgacattattattgtcgatacaccgccagttaatactgtgactgatgcacaactatatgcgcgtgctattaaagatagtctgttagtaattgatagtgaaaaaaatgataaaaatgaagttaaaaaagcaaaagcacttatggaaaaagcaggcagtaacattctaggtgtcattttgaacaagacaaaggtcgataaatcttctagttattatcactattatggagatgaataagtatgattgatattcataaccatatattgcctaatatcgatgacggtccgacaaatgaaacagagatgatggatcttttaaaacaagcgacaacacaaggtgttacagaaatcattgtaacatcacatcacttacatcctcgatataccacacctatagaaaaagtgaaatcatgtttaaaccatattgaaagcttagaggaagtacaagcactaaatctaaagttttattatggtcaggaaataagaattaccgatcaaatccttaatgatattgatcgaaaagttattaacggtattaatgattcacgctatttactaatagaatttccatcaaatgaagttccacactatactgatcaattatttttcgaattacagagtaaaggctttgtaccgattattgcacatccagagcggaataaagcaataagtcaaaaccttgacatactatacgatttaattaacaaaggtgctttaagtcaagtgacaacggcgtcattagcgggtatttccggtaaaaaaattagaaaattagcaattcaaatgattgaaaacaatctgacacatttcatcggttcagatgcgcataacacagaaatcagaccgttcttaatgaaagacttatttaatgataagaaattacgtgattattatgaagatatgaacggatttattagtaatgcgaagttagttgttgatgataaaaaaattcctaaacgaatgccacaacaagattataaacagaaaagatggtttgggttataaacagcaaatgaggggttttatggcacatttatctgtgaaattgcggcttttaatactagcattaatcgattcactgatagtgacattttcagtattcgtaagttattacattttagaaccgtatttcaaaacatattctgtcaaattattaatattggcagctatatcactattcatatcgcatcatatttcagcatttatttttaatatgtatcatcgagcgtgggaatatgccagtgtgagtgaattgattttaattgttaaagctgtgacgacatctatcgttattacgatggtggtcgtgacaattgttacaggcaatagaccgttttttagattgtatttaattacttggatgatgcacttgattttaataggtggctcaaggttattttggcgtatttatcggaaataccttggaggtaagtcatttaataagaagccaactttagttgttggtgctggtcaagcaggttcaatgctgattagacaaatgttgaaaagtgacgaaatgaaacttgaaccggtattagcagtcgatgatgacgaacataaacgcaatatcacaattactgagggtgtaaaagtccaaggtaaaattgcggatattccagaactagtgaggaaatataagattaaaaaaatcatcattgcaattccaactattggtcaagagcgtttgaaagaaattaataatatttgccatatggatggcgttgagttattgaaaatgccaaatatagaagacgtcatgtctggtgagttagaagtgaaccaacttaaaaaagttgaagtagaagatttactaggcagagatcctgttgaattagatatggatatgatatcaaatgaattgacgaataaaactattttagttacgggtgcaggtggttcaataggatcagaaatttgtagacaagtttgtaatttctatccagaacgtattattctacttggccatggtgaaaacagtatttatttaatcaatcgtgaattgcgaaatcgcttcggaaaaaatgttgatatcgttcctattatagcggatgtgcaaaatagagcgcgtatgtttgaaattatggaaacgtataaaccatacgcagtttatcatgcagcagcacacaagcacgtgccgttaatggaagacaaccctgaagaagcagtacgtaataatattttaggtacgaaaaatactgctgaagctgctaaaaatgcagaggtaaagaaattcgttatgatttctacggataaagccgttaatccgcctaatgtcatgggagcttcaaagcgaattgcagaaatgattattcaaagtttaaatgatgaaacgcatcgaacaaattttgttgcagtgagatttggtaatgtacttggatcgagaggatctgtgattccacttttcaaaagtcaaattgaagaaggtgggccagttactgtgacacatcctgaaatgacacgttactttatgacaattcctgaagcttctagactagttttgcaggcaggggcattagcagaaggtggcgaagtatttgtgctagatatgggagaaccagtgaaaattgtagatttggcacgtaatttaattaagctaagtggtaaaaaagaagacgacatacgcattacttatacagggattagacccggcgaaaaaatgtttgaagagcttatgaataaagatgaggttcatcctgaacaagtatttgaaaaaatttatcgtggcaaagtacaacatatgaaatgtaatgaagttgaagcgattattcaagacatcgtcaatgactttagtaaagaaaaaattattaactatgccaatggcaaaaagggagataattatgttcgatgacaaaattttattaattactgggggcacaggatcattcggtaatgctgttatgaaacagtttttagattctaatattaaagaaattcgtattttttcacgcgatgagaaaaaacaagatgacattcgaaaaaaatataataattcaaaattaaagttctacattggtgatgtgcgtgatagtcaaagtgtagaaacagcaatgcgagatgttgattacgtattccatgcagcagctttaaaacaagtgccgtcatgtgaattctttccagttgaggcagtgaagacaaatattattggtacagaaaatgtcttacaaagtgctattcatcaaaatgttaaaaaagtcatatgtttatctacagataaggcagcgtatcctattaatgctaggggtatttcaaaagcaatgatggaaaaagtattcgtagccaaatcaagaaatattcgtagtgaacaaacgcttatttgtggtacaagatacggtaatgtgatggcttcaagaggatcagtaatacctttgtttatcgacaaaatcaaagctggagaacctttaacgattacagatcctgatatgacaagatttttaatgagcttagaagatgcggtagaactagttgttcatgcatttaagcatgcagagacaggagatattatggttcaaaaagcaccaagctcaacggtaggggatcttgcgaccgcattattagaattgtttgaagctgataatgcaattgaaatcattggtacgcgacatggagagaaaaaagcagaaacattgttgacgagagaagaatacgcacaatgtgaagatatgggtgattattttagagtgccggcagactccagagatttaaattatagtaattatgttgaaaccggtaacgaaaagattacgcaatcttatgaatataactccgataatacacatattttaacggtggaagagataaaagaaaaacttttaacactagaatatgttagaaacgaattgaatgattataaagcttcaatgagataggagagattgacgttgaatattgtaattacaggagcaaaaggttttgtaggaaaaaacttgaaagcagatttaacttcaacgacagatcatcatattttcgaagtacatcgacaaactaaagaggaagaattagagtcagcattgttgaaagcagactttgtcgtgcatttagcgggtgttaatcgacctgaacatgacaaagaattcagcttaggaaacgtgagttatttagatcatgtacttgatatattaactagaaatacgaaaaagccagcgatattattatcgtcttcaatacaagcaacacaagataatccttatggtgagagtaagttgcaaggggaacagctattaagagagtatgccgaagagtatggcaatacggtttatatttatcgctggccaaatttattcggcaagtggtgtaagccgaattataactcagtgatagcaacattttgttacaaaattgcacgtaacgaagagattcaagttaatgatcggaatgttgaactaacgctaaactacgtggatgatatcgtcgctgaaataaagcgtgctattgaaggaactccaacgattgaaaatggtgtacctacagtaccaaacgtatttaaagtgacattgggagaaattgtagatttattatacaagttcaaacagtcacgtctcgatcgaacattgccgaaattagataacttgtttgaaaaagatttgtatagtacgtatttaagctatctacctagtacagactttagttatcccttacttatgaatgtggatgataggggttcttttacagaatttataaaaacaccggatcgtggtcaagtttctgtaaatatttctaaaccaggtattactaaaggtaatcactggcatcatactaaaaacgaaaaatttctagtcgtatcaggtaaaggggtaattcgttttagacatgttaatgatgatgaaatcattgaatattatgtttctggcgacaaattagaagttgtagacataccagtaggatacacacataatattgaaaatttaggcgacacagatatggtaactattatgtgggtgaatgaaatgtttgatccaaatcagccagatacgtatttcttggaggtatagcgcatggaaaaactgaaattaatgacaatagttggtacaaggcctgaaatcattcgtttatcatcaacgattaaagcatgtgatcaatattttaatcagatattagtacacactggtcaaaattatgattatacattgaatcaaattttctttgatgatttggaattaagacaaccggaccactacttagaggcagttggaagtaaccttggagaaacgatggggaatattattgcgaagacatatgatgttttattacgcgaacaaccagatgcacttttaattcttggtgatacaaatagttgtttagcagcagtatctgctaaacgattaaagattcctgtgttccacatggaagcgggtaatagatgctttgatcagaatgtacctgaagaaatcaatcgtaaaattgttgaccatgtcagtgatgtgaatctaccttatacggaacatagcagacgttatttattagatgaaggcttcaataaagcgaatatctttgtgacaggatcaccgatgacagaagtgatagaagcgcatcgagataaaattaatcacagtgacgttttaaataaactaggattagaaccgcaacaatacattttagtatctgcgcatagagaagagaatatcgataatgaaaagaattttaaatcattaatgaatgcgataaatgatattgccaaaaagtataaaatgcctgtgatttattcaacgcatccaagaagttggaagaaaattgaagaaagtaaatttgaatttgatccattagttaaacagttaaagccatttggtttctttgattataatgcattgcaaaaagatgcatttgttgtgctatcagatagtggaacattgtcagaagagtcgtctattttgaagttccctggtgtccttattcgaacttccacagaaagaccggaagtactagataaaggtacggttattgtaggtggtattacctataacaatctaatccaatccgttgaactagcaagagagatgcaaaacaataacgaaccgatgattgatgctattgattataaagacactaacgtttcgacaaaggtagttaaaattattcaaagctataaagatattatcaatcgaaatacttggaggaaatgacgatgaggatagcgattgaaaagataattggtttgctgaaaaaccagtcctctaaagaatcgaatgttaagattcatcgcttggcgtatattacaaactcaaaatttgatggcaataactatatagatagatggtgtaaaatcaggaattctcacattggtgaatacagttatattggatttggtagtgattttaataatgtagaagtaggaagatattgttcgatatcttcggatgtaaaaattgggttaggaaaacatcctacacacttttttagctcatcaccgattttttattctaataataatccatttaacataaagcaaaagtttatagactttaatgaccaaccaagccgtacaacaattaaaaatgatgtgtggattggtgcaaatgtaattattatggatggtttaacaataaatactggtgcagtcatagcagccggctcagttgttactaaaaatgtaggagcatatgaggttgttggtggtgttcctgcaaaagtgattaagaagcgatttgacaataaaacaattgaaaaacttttggaaagcaagtggtgggagaaaacgcctgacaaactaaaaggattttcggttgaatatttaaataaaaaggatacttaatgatatgagaattttaaatattgtatcgagtaatattgttcaagacccaagggtacttaaacaaatagaaacaattaaaggcgttacggatgattataaaattgttggaatgaataattcacaagctactaataagcgattggaaaatttagattgtaattatcgtttgttaggtagcaaggtagatccaaaaaatattctttctaaattaattaagcgtataagatttgcaacaggtgttatccgagaaattaaagcttataaacctgacgtgattcatgcaaatgatttcgacgtattattaatggtctatttaagcaattataaaaaagctaatattgtttatgatgcgcatgaaatatatgcgaaaaatgcctttattaataaagttccacttatttcaaagtttgtagaaagtatagaaaaacacatagtaaaacatcgtgttaatgccttcgtaacagtaagtcatgcagcaaaagaatattatcaatctaaaggatataagaaggaagcgaatgttattacgaatgcacctattttaaatgatagcagagaatttaaagaaatcgaaaactttaaagaaattgtatatcaaggtcaaattgtaatggacagaggatatgaagagtttattattgcttcatcagcttttaaacaaaatgctccttcattcataattcgagggtttggtccgcatgaagaagtgataaaagaactgattagttataacccggaaaatattaggttggataaaccagttgaagtaaaagaattggttgataagttagcagaaagtaatgttggtgttgtcttgacgaaaccagtatctattaattttgaatatacagtatctaataaaatttttgaatgtatacatgctggtttaccagtaattttatctcctgtcaaagagcatatttatctcaatgaaaaatataaatttggcattgttctaaaggaagttacgccgttagaaattgaaaaggcggttagaaaattaagagataatcacgatttgtttaatcatttacgtcaaaatgcaattaaggcgtctaaaattttgaattggcaaatagagagtgaacggttagtagaattatataaattttaaagagaggtagactatgaaattttttgtactttgtgcaattatcagcatgaacatatttatagtaatctctacatttactaaagaagtattagggttccctatagagccggtgtattactcaaccatggttggtatagcattaattactacggtgtttgctatttataagataattgtcacccaagaaattccgcgagggttaatattattaattgctatatgtttgctttatctagctttttattatttttcaccagataaggaagagaaactagctaaaaataatattctattctttttaacatgggcagttccagcggcaattagtggtatttatattaaatatataaacaaggctacggtagaaagattttttaaattagtatttttcatattttctgtttcatttatttttgtaattttaataccaaaacttacaggtgagatacctagctatatcaattttggacttatgaactatcaaaacgcttcgtacctttcagcatttactgccggattaggcatttatttcattatgaaaggttcagttaaacataagtggatatatgttctatttacaataattgatatccctattgtgtttataccaggagggcgtggaggtgctattttattaattctttacggcttatttgcatttatacttattacgtttaaaagaggaatacctatcgcagtaaaaagcattatgtatatttttgcattaagcatatctagtgtattgatttactttctttttacaaaaggttcgaatactagaacattttcatatctacaaggtggaacacttaatttagaaggtacttctggaagaggaccgatttatgaaaaaggtatttactttattcaacaaagttcgttattaggctatgggccatttaactattataaactaatcggaaatataccacataacatcattattgagttgattctatcatttggcttattagggttttttatcataatgatttgcattttgctactagtttataaaatgattaggaactatgatccaaacactatagatttactcgttatgtttatagcaatctatccaatcacattattaatgtttagttcaaattatttagttgtaagtgaattttggtttgtgttgttctattttattacaaaaggacggcgtcatcatggctaagaaagtttttattatggatagcgtaaagacaataattggtacgttgcttatagctttaggattacaatttttagcttatccaattattaatcaacgagtaggtaatgaagcgttcggttctattttaacgatttatacaataataacaatcacgagtgttgtattaggcaatacgcttaacaatatacgattgattaatatgaatctatacaaatccaatcattactactggaaatttgcatcgatacttttaatctcaattctgattgagagtatagctttaattattgtatttctttacttttttaatttgaacatcatcgatattatctttttaattctacttaatattttaatgtgtttaaggatttatctgaatgtattttttaggatgactttaaaatataatcagattttgtatattgctcttattcaatttttaggtttgctgataggactatttctatattatttaacccaaaactggattgtttgttttattaccagtgaattgtttgcaacgatatatacattggttaaattacggggattaactataggcgagtatcaaagtgaagataataatgtggtaaaagattatgtgatgctactgagtacaaatagccttaataatttgaatctctatttagatagattaatcttattaccaattataggtggaacagctgtaactatatcatttctttcaacatttattgggaaaatgttagctacatttctatatccgattaataatgtagtactttcatatatttctgtaaatgaaagtgacaatataaagaagcaatatttgaaaactaatctaattgctatagctgccctatgtttagtcatgattatatgttatccaattacaataattattgtctctttactgtataacattgattcaagtttatattcgaagtttattattttaggtaatataggtgttttattcaatgcagtgagtattatgatccaaactttaaatacaaaacacgcatcaataacattacaagcgaattatatgacgcttcacacgattacatttatattcataactattttaatgacaattgcgtttggtctaaatggattcttttggacaacgctgttcagcaacattattaagtatgtgattttaaatattataggtttaaagtctaaattcattaataaaaaggacgtcgattagatgagtgaaaaaaagattttgattttatgtcagtatttttatccggaatatgtatcttctgcgacgttaccaactcaattggcggaagatttaattgcgaatcacattaatgtcgatgtcatgtgtggatggccatatgaatatagtaatcataaacaggtttctaaaaccgagatgcatcgtggtattcgcattcgacgtctcaagtattcgaggtttaataacaaaagtaaggttggaaggatcatcaatttctttagtttattttcaaaattcgtgattaatatacctaaaatgttgaaatatgatcagattcttgtttactctaatccaccaatcttgccattaataccagacgttttacacagactgcttaagaaaaaatattcttttgtggtgtatgatatagcacctgataatgcgattaagacaggtgcaactcgtccaggtagcatgattgataagctgatgcgttacattaatagacatgtctacaagaatgctgaaaatgtcattgtccttggtacggaaatgaaaaactacttactaaatcatcaaatttctaaaaatgctgacaatatccatgtgattcctaactggtatgacatgcgtcaattacaagacaatcgtatctataatgacacatttaaagcttaccgtgagcaatacgacaaaattttattgtatagcggtaatatggggcagttacaggatatggagacacttatctcatttttaaaattaaataaggatcagtctcaaacgttaacaatactttgtggtcatggtaagaaatttgcagatgtcaaaacggcaatagaagaccatcgtattgaaaatgttaaaatgtttgagtttttaacaggtacagactatgctgacgtattaaaaattgcggatgtatgtattgcatcgctgattaaagaaggcgtcggtttaggcgtgccgagcaagaattatggctatcttgcagctaagaaagcgttggtactcatcatggataagcaatctgatatcgttcaacatgttgaacaatatgatgcgggtatccaaattgataatggcgatgcacatgccatttataacttcatcaacactcactcgagtaaggaattgcacgagatgggtgagcgcgcacatcaactgtttaaagataaatatacgagagaaattaatactatgaagtattacaatctgttgaagtgaggagataattatgaagcgattattcgatgtagtgagttcaatatatggtttagtagttttaagtccgattctgttaattacagcattactaattaaaatggaatcacctggaccagccattttcaaacaaaaaagaccgacgattaataatgaattgtttaatatttataagtttagatcaatgaaaatagacacacctaatgttgcaactgatttaatggattcaacatcgtatataacaaagacagggaaggtcattcgtaagacctctattgatgaattgccacaattattgaatgttttaaaaggagaaatgtcaattgtaggtcctagaccagcgctttataatcaatacgaattaatcgaaaaacgtacaaaagcgaacgtgcatacgattagaccaggtgtgacaggactagctcaagtgatggggagagatgatatcactgatgatcaaaaagtagcgtatgatcattattacttaacacatcaatctatgatgcttgatatgtatatcatatataaaacaattaaaaatatcgttacttcagaaggtgtgcatcactaatgagaaaaaatattttaattacaggcgtacatggatatatcggtaatgctttaaaagataagcttattgaacaaggacatcaagtagatcaaattaatgttaggaatcaattatggaagtcgacctcgttcaaagattatgatgttttaattcatacagcagctttggttcacaacaattcacctcaagcaaggctatctgattatatgcaagtgaatatgttgctgacgaaacaattggcacaaaaggctaaagctgaagacgttaaacaatttatttttatgagtactatggcagtttatggaaaagaaggtcatgttggtaaatcagatcaagttgatacacaaacaccaatgaaccctacgaccaactatggtatttccaaaaagttcgctgaacaagcattacaagaattgattagtgattcgtttaaagtagcaattgtgagaccaccaatgatttatggtgcacattgcccaggaaatttccaacggttaatgcaattgtcaaagcgattgccaatcattcccaatattaacaatcagcgcagtgcattatatattaaacatctgacagcatttattgatcaattaatatcattagaagtgacaggtgtgtaccatcctcaagatagtttttactttgatacatcgtcagtaatgtatgaaatacgtcgccaatcacatcgtaaaacggtattgatcaacatgccttcaatgctaaataagtattttaataagttgtcggtctttagaaaattattcggcaatttaatatacagcaatacgttatatgaaaataataatgcacttgaaattattcctggaaaaatgtcacttgttattgcggacatcatggatgaaacgacaaccaaagataaggcataagtcatctattaaataaaatcaacatacaaatcgttttatttggaggttatagtatgaagttaacagtagttggcttaggttatattggtttaccaacatcaattatgtttgcaaaacatggcgtcgatgtgcttggtgttgatattaatcagcaaacgattgataagttacaaagtggtcaaattagtattgaagaacctggattacaagaggtttatgaagaggtactgtcatcgggaaaattgaaggtatctacaacgccagatgcatctgatgtttttatcattgccgttccgacgccgaataatgatgatcagtaccggtcatgtgacatttcgctagttatgcgtgcattagatagtattttatcatttttagaaaaaggaaataccattattgtagagtcgacaattgcgcctaaaacgatggatgattttgtaaaaccagtcattgaaaatttagggtttacaataggtgaagatatttatttagtgcattgtccagaacgtgtactgccaggaaaaattttagaagaattagttcataacaatcgtatcattggcggtgtgactgaagcttgtattgaagcgggtaaacgtgtctatcgcacattcgttcagggagaaatgattgaaacagatgcacgtactgctgaaatgagtaagctaatggaaaacacatatagagacgtgaacattgctttagctaatgaattaacaaaaatttgcaataacttaaatattaatgtattagatgtgattgaaatggcaaacaaacatccgcgtgttaacatccatcagcctggtccaggtgtaggcggtcattgtttagctgttgatccgtactttattattgctaaagaccctgaaaatgcaaagttaattcaaactggacgtgaaattaataattcaatgccggcctatgttgttgatacaacgaagcaaatcatcaaagtgttgagcgggaataaagtcacagtatttggtttaacttataaaggtgatgttgatgatataagagaatcaccagcatttgatatttatgagctattaaatcaagaaccagacatagaagtatgtgcttatgatccacatgttgaattagattttgtggaacatgatatgtcacatgctgtcaaagacgcatcgctagtattgattttaagtgaccactcagaatttaaaaatttatcggacagtcattttgataaaatgaagcataaagtgatttttgatacaaaaaatgttgtgaaatcatcatttgaagatgtatcgtattataattatggcaatatatttaattttatcgacaaataaaatgtgtcaaactagggcatacatgattaaggaaagataagctgtcatgtgtttgaacttcagagaggataatgttatgaaaaaaattatggttattttcggtacgagacccgaagcaataaaaatggcaccattagtaaaagaaattgatcataatgggaactttgaagcgaacattgtgattacagcacaacatagagatatgttagatagtgtgttaagtatatttgatattcaagctgatcatgatttaaatattatgcaagatcaacaaacattagcaggccttacggcgaatgcacttgctaaacttgatagcatcattaatgaggaacaaccggatatgattttagtacatggtgatactacaacgacttttgtaggaagtttggcagcattttatcatcaaattccggtcggacatgtagaagctggacttcgaacacatcagaaatactcaccatttcctgaagagttaaatcgagtcatggtaagtaatattgctgaattgaattttgcgccaacagtaattgcagctaaaaatttactttttgaaaacaaagacaaagagcgtatctttattactggaaatacagttattgacgcattgtcaacaacagttcaaaatgattttgtttcaacgattattaataaacataaaggcaagaaagttgttttactaacagcgcatcgtcgtgaaaatattggggaaccgatgcatcagatttttaaagcagtaagagatttggcagatgaatataaagatgttgtcttcatttatccaatgcatcgtaatctaaaggtaagagcgattgccgaaaaatatttatctgggagaaatcggattgaattaattgagccattagatgcgattgagttccataattttacaaatcaatcgtacctcgtgctgacagattctggtggtattcaagaggaggctcctacatttggaaaacctgtgttggtattaaggaatcatacagagcgtcccgaaggcgttgaggcgggaacatcgagagtaattggcacagattatgacaatattgttcgaaatgtgaaacaattgattgaggatgatgaagcgtatcaacgtatgagtcaagcgaataatccatatggtgatggacaagcatcacgacgtatttgtgaagcaatagaatattattttggattgcgcacagacaagccggatgaattcgtacctttacgtcacaaataataaaaaacccctaatcatgaagttggtttagacaaccagcggtgactaggggtttttaatatatttatttttgatagtggtagccaatatcatatttgaatactttatttgataatattggactttgctgtccatcgtcatcactttttaaacgtacatttttatgagcttctttaaatacatcggaattcaaccaattattaaagctatcttcagattcccaaatagttaagattttaacttcgtctgtatcctcggtatttaatgttttagtgacaaacatttgttggaagccttcaatagtttcaataccttgtctattgtaaaaacgttcaatcgtttcttccgcactgcctttttgtaattgtaatctattttctgccataaacatgggcaatcactcctctattttatgatttgatttgggtaatgtttttacaaatgtaaagagtacagcggtttgtatgataaccattatgattaatcctacacggactgcaagaacatccaccatataaattgaaaaacctattacaatgtataagctaattaaaattttaattttctgttgtagcgtgtagcctcgatgtaaataaaagttttctacatattctttataaattttttgattaataagccaattgtaaaagcgatctgaacttcgagcaaagcaaaaaactgctacgagtaaaaaaggggtcgttggcagtaaaggtaatacggcacctgcaataccaagcgctgtaaatattaagccaatgacgattaaaataagtcgcattgaaaaaactccattctagtactaatgcgcatgtaatattgttttagtaatataactcatgctaaatataatgtgtatgataagtgcaatgactcagtaaaatgaaacgatgttgaattatccttgtcacattaacgcattttaagcgcgactttcataacaaccaaactatttaatgagaattattctcaagtattatagttatattatgtgttttatttttgaaaagtgcaatatgttttcgaaaataagattatttttatgtgcaaaaacgacgcaaaagttttaaaaatgagacttctgtgagctgattattttataaaatgtaaacgcttactatataatgtgaatcatatcgtttaaaagcattattaaatatgatgctaagagatttatattatagccaataaacaaaggagagataatatggcagtaaacgttcgagattatattgcagagaattatggtttatttatcaatggggaatttgttaaaggtagcagtgacgaaacaatcgaagtgactaatccagcaactggagaaacactatcacatattacaagagcaaaagataaagatgtcgatcatgcagtcaaagtggcgcaagaggcatttgaatcatggtcattaacttctaaatcagaacgtgcacaaatgttgcgtgatattggtgataaattaatggcacaaaaagataaaattgcaatgattgaaacattaaataatggtaaaccgattcgtgagacaacagcaattgatattccatttgctgcaagacatttccattatttcgcaagtgttattgaaacagaagaaggtacagtgaatgatatcgataaagacacaatgagtatcgtacgacatgagccgattggcgtcgtaggtgctgttgttgcttggaacttcccaatgctattagctgcatggaagattgcgccagccattgctgcaggtaatacaattgtgattcaaccttcgtcttcaacaccattaagtttattggaagttgctaaaattttccaagaggtattacctaaaggtgttgtcaatatactaacgggtaaaggttcagaatcaggtaatgcaattttcaatcatgatggtgtagataaattatcatttacgggctcaactgatgtaggttatcaagttgccgaagctgcagcaaaacatctagtacccgctacattagagcttggtggtaaaagcgccaatatcatattagatgatgctaatttagaccttgcagttgaaggtattcagttaggtattttattcaaccaaggtgaagtatgtagtgcaggttctcgattattagttcatgaaaaaatttatgatcaattggtgccacgtttacaagaggcattttcaaatattaaagttggaaatccacaagatgaagctacacaaatgggtagtcaaattggtaaggatcaattagataaaattcaatcatatattgatgcagcaaaagaatcagatgcacaaattttagcaggcggtcatcgcttaactgaaaatggattagataaagggttcttctttgagccgacattaattgctgtgccagacaatcatcacaaattagcacaagaagaaatatttggaccagtgttaacagtgattaaagtgaaggacgatcaagaagcaattgatatagctaatgattctgagtatggtttagcaggcggtgtattttctcaaaatatcacacgtgcattaaatattgctaaagctgtacgtacaggacgtatttggattaacacttacaaccaagtaccagaaggcgcaccatttggtggttataaaaaatcaggtatcggtcgagaaacttataaaggtgcgttaagtaactatcaacaagttaaaaatatttatattgatacaagcaatgctttaaaaggtttgtactagaataaatatcgtttctgaagcgtgtttgtaggtcagtctagcggtaagtcttaacatttaacggcgttgtttagattttaagcaaaacaaaatatataggaacacgtatcatgatattaggatataatgactaaaataatagcagtaggatggtttttaattgcaaatcatcttactgctgtttttaattatgctaatttgcgatgcggctattataaggacagagttgtttattaattatggtgatttagaaatatgaagttcaatatgcaaagtcatcgtttgttttaatatgcggaacaatcattaaagttattgcgattttttgaacttaatgaaactaaacaataaatttgagatacttttttgtcatttttatgtaactaacacaataatctcgtacattattaaaattttctatatgataggaataaagcaaagcgcgagtgtgctgtaaaagttttccaaggtgatattacataaagctataaagggtaaagattaatgagttgtcatgtaaatgacgatgatgtataaatcatggttaattacggaagcattaatattaacctgagaagctataaagaattatttttaaaagcgacaatattaaatacgacgcatttatttaggagtggcaaacgtatgaatgggaaaaaggcgaatacgataaacagatacaaatattttcatcatgtcaatcatcaaaaaattcaacaaagttctaaaaagacgctgtgggcatcactaatcatcacattgttatttacagtgattgaatttgtcggaggtttagtatctaattcattggcattactgtcagattcatttcatatgcttagtgatgtattagcacttggtttatctatgttggccatttattttgcaagtaaaaagccgactgcacgatacacatttggatatttaagatttgagatattagctgcatttttaaatggtttagcattaattgtaatttcaatctggattttatatgaagctattgtacgtattatttatccgcaaccaattgaaagtggcattatgtttatgattgctagtattggtttactcgtcaatattattttgactgttatccttgtaaggtctttaaaacaagaagacaatatcaatattcaaagtgcattatggcatttcatgggagacttattgaactctattggtgtcatcgttgcagttgtattgatttactttacaggatggcgcatcatcgacccaatcattagtattgtaatttcactcatcattttacgtggtggttataaaattacgcgtaatgcgtggttaattttaatggaaagtgtgcctcaacatttggatactgatcaaattatggcagatattaaaaacatagatggcatattagatgtacatgaatttcatttgtggagtattacaacagagcattattcattaagtgcccatgttgtgttagataaaaaatatgagggtgatgattatcaagcgattgatcaagtatcatcattgttgaaagaaaaatatggcattgcacattcaacgttgcaaattgaaaacttgcaattgaatccattagatgagccatacttcgacaaattaacataaataaaacattgtagcgcctaaaacattaatctatgtcataggcgcacgtttcgttttatacttatgttgcatcatttaaatgattttcgtcaatttctttgatgctatctacatctaacacgacatctttaggtttcaaaatatgaatatgtttttcatcatttgtatgtaaaatgcgttctatgatgtacctttgaccggccattgtttctacagcaatctttttgtttctagctaaacttgctacgacagattctttatccataatgatagccccctatatatatgtttatttacttataccctaacatgatttttatactctttgaaaatatattttacagaattttatctaaatatttaaaaaaatatcttaatatccttgtaatccgataagaattatagtaatattttttcaaccattgttataggaggtcttattaatgacattatttttattagaagctaacaatcttgattttgcatcaacgaaagaagaactagaagcaaaggcagcatcactatctacgaagacaattccaacattaattgaagtacaagctactgaaaatttaactcatggttattttattgtggaagcaaatgacgaagcagaagctaaacaatttttaacagaagcagatattagtattcaattagtcaaagaagtacgcttagttggtaaagatttagatgaagttaaaaatggtgatgcacatgttgattaccttgtaacttggaacattccggaaggcattacgatggatcaatatttagcacgtaaaaagaaaaattctgttcattatgaagaagtgccagaagttgaatttaaacgcacatatgtatgtgaagatatgtctaaatgtatttgtttatacaacgcacctgatgaagaagcggtacgtcgcgcgcgcaaagcagttgatacaccgattgatggcatcgaaaaactttaataagacaacaagttgatgagatatatgtatataggtttggcatggatttcgattgcagttaattagaatagctcaatgctataaatgtaagtagttgatatgaagaaactaatgaactaaatgcaagtattgtctaaaacaatcattttattgaaatttagtagagctgaaattaatataacgtcgttaattgaataacgcttatgttataagagcactcataccaaaccataatcatctatagatataacaattcacgatataagggctgtgtttggcatagccctttagatatacacttaattcctattaaaatagtagggattaaaagggggcttgtcatgattaaaattcaacaattacaacatcactttggatcacataaagtaattcataactttaatttggacattagcaagggagaaatagtcactttcatagggaaaagtggttgcggaaagtctactttactcaatattatcggtggatttattcatccatcgtctggtcgtgtcattattgataacgaaattaaacaacagccatctccagattgtttaatgctatttcaacatcataatttgctgccatggaaaacgattaatgacaacattaggattggattacaacagaaaattagtgatgaagagattaacgcacagcttaaattagttgatttagaagacaggggaaagcattttcccgagcaactgtccgggggtatgaaacaacgtgtggcactatgtcgagcgcatgtgcataagcttaacgttatattgatggatgagccattaggtgcattagatgcatttacacgttataaacttcaggatcaactagtgcaactaaaacataaaacgcaatcaactattattttagtgacgcatgacattgatgaagctatttatctttccgaccgcattgttctgttaggtgaagggtgcaatattatttctcaatatgaaattacagcatcacatccacgcagtcgtaatgatagccacctacttaagattcgtaatgaaattatggaaacatttgcattgaatcatcatcaagttgaacctgaatattatttataaggagtgagtgacgatgaaaaggttaagcataatcgtcatcattggaatctttataattacaggatgtgattggcaaaggacgtctaaagaacggtctaaaaatgcccaaaatcagcaagtgattaaaattggatatttgccgattacacattcagctaatttgatgatgactaaaaaattattatcacaatacaatcatccgaaatataaactagaattagttaaattcaataattggccagatttaatggacgcattaaacagtggtcgtattgatggtgcatcaactttaatagagctagcgatgaaatcaaaacagaagggctcaaatataaaggctgtggcattgggccatcatgaaggcaatgtcattatgggacaaaaaggtatgcacttaaatgaatttaataataatggcgatgattaccattttggtataccacatcgttattcaacacattatcttttacttgaggaattacgtaaacaattaaagattaaaccggggcattttagctatcatgaaatgtcgccagcagaaatgccagccgcattgagtgaacacagaattacagggtattctgtagccgaaccattcggtgcactgggtgaaaagttaggcaaaggtaagactttgaaacatggtgatgacgttatacctgatgcgtattgctgtgtgctagtactgagaggggaattgcttgatcaacacaaggatgtagcgcaagcatttgtacaagattataaaaagtctggctttaaaatgaatgatcgcaagcaaagtgtagacattatgacgcatcattttaaacaaagtcgtgacgttttaacacagtcagcggcatggacatcctatggtgatttaacaattaagccatccggctatcaagaaattacgacattggtaaaacaacatcatttgtttaatccacctgcatatgatgactttgttgaaccgtcattgtataaggaggcatcgcgttcatgacacgtcccacaaataacaaatttatattacctattatcacatttattattttcttaggcatttgggaaatggtcattattattgggcattaccaacctgtattgttaccgggtcctgctcttgtaggaaaaagtatatggtctttcattgttactggagaaattttccaacatttagcaattagtttatggagatttgtagcgggctttgttgtcgcattgttggttgctattccattgggcttcttgcttggaaggaatcgttggctatacaacgctatcgaaccgctatttcaattgattaggccgatatctccgatagcatgggcaccatttgttgttctatggtttggtattggtagtttgccagcgattgcgattatttttatcgctgcttttttcccaattgtgttcaatactattaaaggcgttagagacattgaacctcaatatttaaaaatagcagcaaatttaaatttaactgggtggtcattgtatcgcaatatattatttcccggggcatttaaacaaatcatggctgggatacatatggcggtaggaacaagttggatatttttagtttctggtgaaatgattggtgcacaatcgggattaggttttttaatcgttgatgcacgaaatatgttgaacttagaagatgttttagcagcaatattctttatcggattatttggttttattattgatcgattcattagttatattgagcagtttatacttagaagatttggtgaataaggagagatgatgatgactttagaaacgcttatcaaagaacaattagatcctcatttagtagaagttgatgaagggacgtattatccgagaacatttattcagcaattatttgtagatggttatttcggtgaggcggcattgagaaaaaatgctgaagtaatcgaagctgtatcgcagtcttgtttgacaacaggattttgtttatggtgccaattagctttttcaacgtatttagaaaatgccacgcagccacatttaaataatgacttacaacagcaattgttatctggagaaatattaggtgctaccggattgtctaatccgatgaagtcatttaatgatttagaaaagttgaaccttgaacacacttatgttgatggacaattggttgtcagtggacgtatgccagctgtaagtaatattcaagaagaccattattttggtgcgatttcgaaacatgaatcatcagatgaatttgtcatgttcattctacgtgccaatcaagatggtatcactcttgttgaaaaaaccaattttttaggagtcaacgggtcagcaacgtatcaaatcacattgaatcaagtcgtagtgccacaatcacaaattatcacgcatgatgcgaagcagtttgcggcaactattcgcccgcaatttattgcttaccaaattccaataggattaggctcaattaaaagttctttagagttaattgatgcattttcaaatgtgcaaaacggaataaatcaatatttagagtatgatgttgaagcttttaaaaaacgttatcgtcaacttagagaggaatattatgcaatattagatgacggtaacttaacttcacatttaaatgaattaatatcattgaagaaggacatcggctatttattgttagatgtaaatcaagcttctgttgtcaatggtggttctagagcgtacacaccatattcgccacaagttcgcaagttaaaagaaggattcttcttcgcagcattgacaccgacattaagacatttaggtaaacttgaagcagagttgaaggggtaagtgtgataagctgattttttgtttagatgcgtttgttgaaacattttttaaaataatataaatcttagtttataaacattttctgttaatttgttatatccttttaactaggaaaatatacatttcgtaataataataatcgttatcattgaaaaagtgttaataaggtgtataatgaaaatgtgaacaattaatgaacttcttattttaaagaaggtgaatactatagatacgcatactaaagaacaacaattctcgaatctagtaagatcttatcgtaaagaatacgtgggtaaaggacccaatagtattcgagtgtcgtttaaagataattgggcgattgcacatatgacaggtgttttgagtaaagttgagagtttttacctaaacgacaaacgcaatgaatcgatgctccattatacacgcacagagaagattaaacagatgtataaagaaatagatgtaaatgagatggaaagtcttgtaggcgctaagtttgtaaaattatttacagatattgatttgaatgatgatgaagtcatttcaatatttgttttcgataagtcaatagaataagtgttgctggtgtaaggtacacggtgctgtttgctaacttcgctttgaatttaacaataattcaagggggtggtatgtcaaacggtgccgtttttttgtcatatttttaaaacaagcaacatgcaacacgtactttaaggaagtcaaaatttatcatttaggagagatggatatgaaaatcgtagcattatttccagaagcagtagaaggtcaagaaaatcaattacttaatactaaaaaagcattaggattaaaaacatttttagaggaaagaggacatgagttcattatattagcagataatggtgaagacttagataaacatttaccagatatggatgtgattattagtgcgccattttatcctgcatatatgactcgtgaacgtattgaaaaagcaccgaacttgaaattagcaattacagcaggtgtaggatctgaccatgtagatttagcggcagcaagtgaacacaatattggtgtcgttgaagttacaggaagtaatacagttagtgtggcagaacatgcggttatggatttattaatacttcttagaaactatgaagaaggtcatcgtcaatcagtagaaggtgaatggaacttgtctcaagtaggtaatcatgcgcatgaattacaacacaaaacaattggtatttttggatttggtcgaattggacaacttgttgctgaaagattagcgccatttaatgtaacattacaacactatgatccaatcaatcaacaagaccataaattgtctaaatttgtaagctttgatgaacttgtttcaacaagtgatgcgattacaattcatgcaccattaacaccagaaactgataacttatttgataaagatgttttaagtcgtatgaaaaaacacagttatttagtgaatactgcacgtggtaaaattgtaaatcgcgatgcgttagttgaagcgttagcatccgagcatttacaaggatatgctggtgatgtttggtatccacaacctgcacctgctgatcatccatggagaacaatgcctagaaatgctatgacggttcactattcaggtatgactttagaagcacaaaaacgtattgaagatggagttaaagatattttagagcgtttcttcaatcatgaacctttccaagataaagatattattgttgcaagtggtcgtattgctagtaaaagttatacagctaaatagaataaggatgctgggctagcgattaacgctttcaattttatataaatgaatcatataagcactactgctgttgtaaagatggcagtagtttttttatgattacatctaagtatagtcacggctatgttaggacaatgatttaacatttacgcacatatgtgttcacttacgcaattattgataaatttcattcatttggaataatatatagtcatatagtgctaatttttttgaggcattatatgcaagatgcattgtaaagtcgatgcatttgtttgttaaataactttgtataactaaaaattctttgtttcaacgtataatctaataatagattttatataaatggtagtgtgtatatatgtggaaaggggtgtagttattaatgaaacgcttaagtacgactttgaaagtacgattgattagcaattttttacagctaattattacgacagcatttataccgtttatagcactatatttaacagatatgttaagtcaatcaattgtcggtatatatcttgttggtttagtggttctaaaatttccattgtccattatatctggttaccttattgagatatttccgaaaaagttgctagtacttatttatcaagcgacgatggtgataatgcttgtgttcatgggcgtatttgggtcacatcaattgtggcaaattattggtttttgtgttgcatatgccatatttacaatcgtttggggattacaatttccagttatggacacattaattatggatgcaattaccgaagacgtggaacattatatttacaagattagctattggatgacaaacttatcggtagctattggggcattgttaggtggcttgatgtatggctacagtatgttactacttttcttaatagcagcttgtatatttttaattgtactctttattttatatatttggttacctcaagaccgaaatcaagtaaagcaaagtgatgacaagaggcatgcaagtcgttatcaaaaattacaaataatgaatatatttcgcagttataaattagttttgaaagaccgtaattatatgttattgatttcggggttcagtatcatcatgatgggtgaattttcaatctcctcatatattgctattagactaaaggatcagtttgaaacaataagtataggttcatatgatattacaggtgctaagatgttagcaatcttgctaatgattaatacggtcgtcgtcattttactcacgtattcaatctcgaaagttgtattgaaaatagattttaaaaaagctttaatcactggtttgctgatttatattgttggctatagtggtctaacctatcttaatcagtttggcttattagttgtttttatgataattgcgactgtaggtgaaattatttattcgcctatagtttcagaacaacgctttaaaattattcctaaagctaaaagaggaacatatagtgcagttaatgcattaggtattcatttttcagaaacactagctaggttagggattgtgttgggtgttttcttaacgtcattacaaatgggactgtatatgtttatcgttttaacaattggtgctagcatgcttgttgctggtgtatttgggggacaaaaacaagtgaatacaaattgaatttatttaaatatttattttatgcatctttttatatggaaaacctattaatttggtcgtaattaaaatagagataaatttattaagaatttgttaaaatttaaggataacaattgttttatgcgagttgtttgtttaatataaacttgcttcatggatattttgtaacaacaatattgagtttgcaatgagatgtgaacaacagaaagtgattaacgatttgtagtgtgctatttatcgaagatgtatgtaatttacattgaaaaatataccaattgtaacgatgatacaagatgtattttagggtagaatatatcgctcatatgttgcgaatggtgttttatattaatcattacataacgagttaattaacatttcgtcggttatcatatcatcatgcaatttcagtaagtaatgagtattatgatatgaaagaaggactttttatgattatgggtaatttgagatttcaacaggaatattttcgtatatacaaaaataatacagaatcaacgacacaccgtaatgcgtattgggttaaactcgctaaaaatgttgaagctactaaaatgatgtatgcattatcgacaattgtgcaacaacatgcatctataagacatttttttgatgttactaccgatgacaatttaacaatgatacttcatgaatttctgccttttattgagataaaacaagttccatcttcttccgcaaactatgatttagaagctttttttaagcaagaattaagtacttaccattttaatgattcacctttattcaaagttaaattgtttcagttcgctgatgctgcatatatactattagattttcatgtgtccattttcgatgatagtcaaattgatatttttcttgatgatttatgcaatgcatatcgtggcaatactgttattaacaatactcgacagcatgcacatataaatagaaatgatgataaagacaatcaagatgcatcgcatatagcattagactcaaactattttcggttagagaataactctgacatccatattgatagttattttccaattaagcatccatttgaacaagctttatatcaaacgtatttgattgatgatatgacatcaatagatatggcatcgttggctgttagtgtgtatttagctaatcatataatgagtcaacaacatgatgtcacattaggtatacatgtaccatcacatttaccaaatgatttacacggaaatattgtgccgttaacgttaacaatcgatgcaaaagatgtatgtcaacgttttacaacagattttaataaatgtgtgttgcaaaatatgtcgcaattacagtgcgcgaagtcttcgctttcactagagactatttttcattgttatcatcatatgatgtcttgttgtaatgatgttattgaggatgtacatcaaatacatgatgcacatacatctttagcggatattgaaatttttccacatcaacacgggttcaaaattatatataacagtgcagcatatgatttgctctcaatcgagacgctgagtgacttagttcgaaatatttatttgcaaattactgaagaaaatggaaataaacgaacaactgtagatgaacttaatttgatgacagaacgtgatattcaattatatgacgatatcaatttaagtttgcctgagatagatgatgcgcaaacagttgttaccttatttgagcaacaagttgaagcaacgccgaatcatgtcgctgtgcaatttgacggagtgtttataacatatcaaacattgaatgcacgcgcgaatgatttagcacaccgtttgagaaaccagtatggtgttgaacctaatgatcgtgtcgctgtcatagctgaaaaaagtattgagatgataatagcgatgataggtgtgttgaaagctggtggggcttacgtgccaattgatccgaactatccaagtgatcgtcaggagtacattttaaaagatgtaacgcctaaagttgtaataacgtaccaagctttatatgaaaatggtaaacaaaatattaatcacattgatttgaataagatagcgtggaaaaatattgataatctttctaaatgtaacacgttagaagatcatgcttatgttatttacacgtcggggacaactggtaaccctaaagggacactaattccgcaccgaggtattgttcgcttggtccatcaaaatcattatgtaccattaaatgaagagacgacgattttgttatcaggaactatagcctttgatgctgcaacatttgaaatatatggtgcattgctcaatggtggaaagctgattgttgctaaaaaagaacaattattaaatccaatagcggtagaacaattaatcaatgaaaatgacgttaatactatgtggttaacctcctcattatttaatcagattgctagtgaacgaatagaagtattggtaccgttaaagtatttattaattggtggagaagtattgaatgctaagtgggtggatttgcttaatcaaaaaccgaagcatcctcaaattattaatggttatggaccaactgaaaatacaacatttacaacgacgtataatatacctaacaaagttccaaatcgtattcctattggtaaaccgattctgggtactcatgtttatatcatgcaaggcgagcgtcggtgtggcgttggtattcctggagaattatgtacaagtggctttgggttagctgcaggttatttaaatcagccagaattgacagcagataaatttatcaaagattcaaatataaatcagctgatgtatagaagtggtgatatcgttcgtttgttacccgatggcaacatagattatttatatcgaaaggacaaacaagttaagattcgagggtttaggattgagttgtcagaggttgagcatgcgctcgagcgtatacaaggtattaataaagcagttgttattgttcaaaatcatgatcaagatcagtatatcgttgcttattatgaagcgatgcatacattatcacataataagattaaatcacaattacgtatgaccttaccggagtacatgataccagttaatttcatgcatattgagcaaattcctattactattaatgggaaattagataagaaggcattgcctatcatggactatgtcgatacggatgcctatgtagcaccgagtacagataccgaacacttgctatgccaaatttttgcagatattttacatgtgaatcaagtaggtattcatgataatttctttgaattaggtggccattcattaaaagcaacgttagtggtgaatcggatagaggcatctactgggaaacgattacaaattggtgatttattacaaaagccaactgtatttgaactagcacaagcgattgctaaggttcaagaacaaaactatgaagtgattccagaaactatagttaaagatgattatgtgctgagctctgcacaaaagcgtatgtatttattatggaaatcaaaccataaagatacggtgtataacgtaccttttttatggcggttatcatcagaacttaatgtagctcaattgcgacaagcagtgcagcgtttgatagcgcgacatgagattttacgaacacaatatattgttgtagatgatgaggttcgacaacgtattgtggcagatgttgcagttgactttgaagaagttaacacgcattttacggatgaacaagaaatcatgcgccaatttgtagcaccttttaatttggaaaagccaagtcaaattagagtgagatacattagaagtcccttacatgcatacctctttatagatacgcatcatatcattaatgacggtatgagtaatatacaattaatgaatgatcttaacgcactttatcaacataaattattgttaccacttaaattgcaatataaagactatagtgagtggatgtcgcatcgtgatatgacgaaacatagacaatattggttatctcaattcaaagatgaagtacctattttaagcttaccgacagactatgttagaccaaatattaaaacgacaaatggagcaatgatgtcatttacaatgaatcaacaaatgagacagctacttcaaaagtatgtagaaaagcatcaaattactgattttatgttctttatgagtgtggtcatgacgttgttaagtagatatgctcgaaaagatgatgttgttgtcggtagtgtgatgagtgcgcgtatgcataaaggcacggagcaaatgctaggcatgtttgctaatacgttggtatatagagggcaaccgtcacctgataaaatgtggacacagtttttacaagaggttaaggaaatgagtttggaggcatacgagcatcaagaatacccattcgaatgtttagtaaatgacttagatcaatcacatgatgcctcacggaatccattatttgatgtcatgttagtactacaaaacaatgaaacgaatcatgctcattttgggcatagtaaattaacacacattcaacccaaatcagtgacggcgaaatttgatttatctttcatcattgaagaagatcgcgatgactatacaatcaatatcgagtataataccgatttatatcactcagaaacagttcgtcacatgggtaatcaatgtatgattatgattgattatattttgaagcatcaagatacactacaaatttgtgatataccaaacggcacggaggaacttctaaattgggtcaatacgcatgttaacgatcgaatgcttaatgtcccgggaaataaatctatcataagttactttaatgaagttgtctcacgacaaggtaatcatgttgcgctagtcatgaatgatttgacaatgacgtatgaaacattacgcaactatgtggatgccattgcgcacatgctcctatcaaatggtgtgggcaatggtcaacgggttgccttgtttacagaacgtagttttgaaatgattgcggcgatgttggcgacagttaaagtaggtgcatcttatatacctatcgatattgattttccgaataaacgacaaggtgcaattttggaggatgctaaagtaactgcagtcatgtcttacggcgttgaaattgaaacgacattaccagtcattcaattggaaaatgctaaaggctttgttgaatcaaaggaaaatgaacaatatgatgatttacatggcaatcaacttgaaaacacagcgatgttagataatgagatgtatgctatttacacatctggtacgaccgggatgcctaaaggggttgccatacgacaacgaaatttgttgaatttagtgcatgcatggtcaactgaattgcaattaggcgacaatgaagtatttttgcaacatgcaaatattgtttttgatgcatcagttatggagatttattgttgtttgttaaatggtcatacgcttgtgattccagatagagaggaacgtgttaatccagaacagttacaacaactcattaataagcatcgtgtgacggttgcgtcgattccgttacagatgtgtagtgttatggaagacttttatattgaaaagttgattacaggcggggcaactagtacggcatcctttgttaaatatattgagaagcattgtggcacgtatttcaatgcctatggaccatctgagtcaacagtcatcacatcgtattggtcacatcattgtggtgatttgatacctgagacgattccaattggcaaacccttatctaacatccaagtgtatattatgtcagatggtttgttatgcggtattggtatgccaggcgagttgtgtattgcaggtgatagtttagcgataggatatattaatcgtccagaattaatggctgataaatggcaaaataatccatttggtaaaggaaagttgtatcatagtggtgatttagcacgttatacatctgatggtcaaattgaatttttaggaagaatagataaacaagtgaaagttaacgggtaccgtattgaacttgatgaaattgaaaatgcaatattagctattcgtggtatatctgattgtgttgtaacagtaagtcactttgatacgcatgatatattgaatgcttattatgtcggagagcaacaagtggaacaggatttgaagcaatatttaaatgatcagctgcctaagtatatgattcctaagactataacgcatatcgattgtatgccattaaccacgaatgacaaggtggatactacgcgtttgccaaatccatcacctatacaacagtctaataaagtgtatagcgaaccctctaatgaaattgagcagacatttgttgatgtatttggagaggtattgaaacaaaatgatgtcggtgttgacgatgatttctttgaacttggtggtaactcattagaggcgatgttagttgtctcgcatttaaaacgatttggccatcatatttcaatgcagacattataccaatataaaaccgtgcgacagattgttaattatatgtaccaaaatcaacaatcattagttgcattaccggataatctttcggaattacaaaagattgttatgtctcgttataacttgggtattttagaggatagtctaagtcatcgacctctaggaaatacactattgactggcgcgacaggttttttaggtgcttatctgattgaagtactacaaggatacagtcatcgcatttattgtttcatacgtgctgataatgaggaaatagcatggtataagttgatgacgaatttaaatgattatttttcagaagagacggttgaaataatgttatcaaacattgaagtcattgttggtgatttcgagtgtatggatgatgttgttttaccagaaaacatggatacgattattcatgcaggtgctcgtacagatcactttggtgatgatgatgaatttgaaaaagtaaatgttcaaggtactgttgatgtcatacgtttggcacaacaacatcatgcaaggttaatatatgtgtctacgataagtgtgggaacttattttgatatagacacagaagatgtgacattttcagaagcggatgtctataaagggcaactactaacatcaccatatacacggagcaaattttatagtgaattaaaagtattagaagctgtaaataatggcttagatggtcggattgtacgtgttggtaatttgacgaatccttacaatggaagatggcatatgagaaatataaagactaaccgtttttcaatggtaatgaatgatttgttacaactggattgtatcggggttagcatggctgaaatgcctgtagatttttcttttgtggatacgactgcaagacaaattgtcgcattagcacaggtcaacacaccacaaatcatttaccatgtgctatcacctaataaaatgccggtgaaatctttgttagaatgcgttaagcgcaaagaaattgaactcgtcagcgatgaatcatttaatgaaattttacagaaacaagacatgtacgaaacgattggattaactagtgttgaccgtgaacaacaactagcaatgatagatacaacattaacattaaaaataatgaatcacatcagtgaaaaatggccaacgataactaacaattggctgtatcattgggcacaatatatcaaaacaatattcaataagtaagtagggaaagttatgacagtatttgtaatgcaattacagagtaacttgaaaagtattgaagaattaatatcacaaagtcgttggtcatataaaaaaccgcgtacagtcaactatagatacaatcaagataaactcatgcacagattgggagatattttagtgcaatatggaattcaacatgacacaggtttattaccacatgaatggcattatcacatttcgccacgaggtaaggcagatattgttcaacacaatcgtgatggacagcccatctatgtgagcttatcatatagttatccttatatcgtgtgtgttgtcgataaagaaccagttggtattgatatcgaaaagatatcacaacgtttagactggcgtacgttagtgacgtgtttctctacaaacgaagcacatcaaatatgtagtttaaatgatttttatcaaatatggacacaaaaagaaagttttacaaaattgattggtgaaggtttaatcaaaggattggacatttatgatatgacacaatcacacttttatcaatcacgtgaagtgaagttcaaacaatttatttttgatcagtttatggtacaggtatgtttcttaggacaggcaccctggggttataaaaaagtgtctgtatttcagttattgagtagttaatatgacgtctgacagtatcattgcgcagtgattttaaactatactgcctaaatgtttactgttagatgtttttttattggaaaaatgaaaggtgaatacacgatggcatcattcaaaatcatgacgagattaaagtaagtgataaggtaaaaatatactgagcaatattgaaattaccgaaaataatagtttgttacgacgcatttgagactttaatgctcacgtaagttggctggaatcatatcatgtcagttaataaaataacgtgagcatcaatcatcatactcaaacgatgatttaaaactcacgttaatgttagtcagtgtattaatttaatttatagcgatagacaaaatgttgtcgcactaattcaattgtcatcatccagacgatatggccaaagaattctgacagatgctcttggaatggttgatcccacacagcaggtacagtatgcatgattggcataatgataaggtggaataatacccaaatagcaataccaaaaacagcaccttgtcccattgctaagtaagcgtattttttaactaatatgcagtaaataattgcaatgacgatagaaaaactaaagtggacaataaagcttacccaaggcaattccatatttgaaaatgtatatgtttgatgcgtaaactcactactaaatcctaattgttgcaataactcttgaggtgggttcgttgcattacgttctggtgtgcgaggtggaaacatgacctcccaacctaattttacaattccagataacaagccaccgataattccagcataaatgaatatacccatttgtcgtttcgtcaacttaaggactcctctctatttactatcctcattatagtattttgtgaaaataatcacaataaaaagctttgcaaaacttaaaatattttgataaacaaatttgtaaaaggttattagttttttacatctcatattgtatcgtactgtattcaaaattgttaacgagatgaacggtaaataaatgttttagcgcaatggataatcgaactggaatcatctcgcgtgtcaaaacttgttaggccttaatttcatagttatgaattaaggattgttgtgccaacaaaatcattattgtaaatagattcaatgatatttggcttgtttcctgatgcaatgataactttaggacagccattttcaatcgcatttttggcatctagcactttgggaatcatacctccataaatatcaccatgttcaatatattgatgaatatcgactaatggcaattgaggtataacaacatcattgatgagtacacctgcaatattacttaatacataaataggcgcttttaatgatgatgcaataaaataggcaagcgtgtcagcattaatattgtaaaattctccatcatggttattgaaaccaatcgaattgatgataggtacaaatttagtacataaatactgtaaagcatccttatttaaagcggtcggaacaccgacatatccatattgttgatcaaaagatgtaatttcaaacagctgtgcatccaaaccacataagcctattgcagaacattggtgctggttaaattgagctactaatgcagtgttaacgtctgcaatgagcgtgtgtttagtaatggtcatggttgctttatcagtcactcttaggccattaacaaagtgtggctcgatttgctggtttgataatgcttcattaataaatgggccaccgccatgaacgataatggggtagatgttgtttgatcgtaaatgcttaatgttgttaataattgatggatgcatgtcactaagtgtactgccaccaattttaatgacaataaatttcatctaaccaacaccaccttatgttcgatatgatgcgttgatacgcacataatcataggataaatcacaaccgtatgcagtcgctgcagcgttacctaaaccaagctgaacgtcaattgtgacattttcatgagttaatgtattcgacatagcttgctcatcaaatagtacagccatacctttatcaacgacaggtatttggttcagttgaacatatgtgcagttaggatcaatttcacatccgctgtagccaatagctgtaatgattcgaccaaaattggcatcttcgccaaaaatagctgattttactagatttgaacttacgatagttttaccgatttttcttgcatctgatattgatttagcgcctgacacattgacgctgattaactttgttgcgccttcgccatctctggctatagctttagctaaaaatgtacagacaaaattgaatgcatcaacaaatgtttcccattgtggatggtcttgactaagtatttggtgttcaacttggtgatttgccatgactaataccatgtcatttgtacttgtatcgccatcaacagtaatcatattaaatgtatggtcagtcgaagattttaataattgatgaagtgtattcgattcaatcgatgcatcggttgttataaaagcaagcatggtagccatatttgggtgaatcatacctgaacctttggtgctaccaccaattgtaacggttttaccatcgatttttagtgatacagcgatatgttttgtacaggtatcagttgttaaaattgcctcgttaaacgcacctggcgttgcaaaattagcatccttaatatgttcggtcccagtcttaattttatccataggcaaatattcaccaatgaccccagttgaagcaacagcaacatgctcagatggtatttgaagttgttgagcaacccatgtttgtgtttgtcgtgcatcatctatgccttgttgaccggtacaagaatttgcattagctgaattaacaacaagtgcttgtaattttcctttagacttttgtaaagtgtcttcagtgacaataagtggtgcagctttaaactgatttaaagtatatacggcagctgcacttgccaaagacgatgagtaaatccacccaaagtcttttttgttagcgcgtaaaccgatgtgcataccaccagccgtgaagccttgaggtgtactgatatcgccatgtttaataattgaaaagttatattgttgtgatgtcgtttcttgatgtttcattctaacaccccttatggataaactggtgattgatttaggccagtcgtcacttcaaaatcatataatatatttaaattttgaatggcttgcccacttgcgcctttgacaaggttatcaatcactgatactaaaattgctgtttgcgttgtttcatctacatagatgccgatatcgcagtagttactaccgagtacttcttttgtggttggaaaagtcccaatatctctaattctgacaaatggctgattagcataataagaggtcattaatttatgtaatgattcagtcgtatattcagatgataatttgacatatattgttgataaaatacctcgtgtcattggtacgagatgtggtgtaaatatgactgatacatcttgacccgcaatgatagataaatattgctcgatttccggtttgtgtttatggtttccgattgcataagcgcttagattttcattcatttctgaaaaatgaacacgttgtgataatgaacgaccagcacctgacacgccggtcttagcatcaataataatagatgacaaatctactattttttcgctaataagtggatgtaatgctaataatgttgctgtagggaaacagccaggattagaaatgagcttcgttccattgttatcaaacgattgccattctgaaatgctgtaaatagcatgattcaaatcatcttgtgctgcagcagtttctttgtaatatgcttcatatatttcacgattcttaattctaaatgcgccagataaatcgataacatgaatacctttttctactaagggagggatacatgttttacttacgggtgctggtgtcgcaaagaaaattacatcacagtcattattatccactgtaagtgcttcgaaatgttgcataatatgttgtaaatgtggaaatgttaatttcaacggttcatctacttttgaatgtgagtagatgtgtgcaatcgttacatgaggatgtgtttgtaacaatcgaattaattcaattgcgccataaccgctaccgccaacgatacctactttaatcatcatgaatccctcctatgtcatatataaatgattaattgttaatttttaaaaacgtcttgaaaagctgcaacaatttgatggatttcctctttatcaatgactagaggtggagacaatcgaatgatagtacgatgcgtgtctttgcataagattccacgttgaatcagttgatccacaaaaggtgcagcatctgtgttaagctctatgcctataaataaaccacgacctctaatttctttaatactaggatgtttaagttgtagcaacgcttttaataaaaatgaacctaagcgttctgatcgttcaaccagttgttcatctttaagtacatcaagcgctgccgtcgatattgcaatggctaaagggttaccaccaaatgttgaaccatgtgtacctggtgttagaacacgcatgacatcattatttgcaagtacagcagatacagggtataagccgccacccaatgccttacctaaaatataaatgtctggaacgacttgctcccattccatagcaaaccatttcccagttctaccaagaccaacttgaatttcatctgcaatcaataatatttgatgtttatcacatagttgacgcacagcttgaatatatcctttcggtggtatattaacgccaccttcaccttgaattggttccaaaataattgctgctgtattcggtgaaatagcttgtgttaattgttcaatgtctccaaaatctactgttgtagtgccttgaagtagggggtgaaatcctgctttatatgcgtcgtggttagatagtgataatgagccaagtgtacgaccgtgaaaattgttattcatagcgatgatttcaacttgtccgtcagtaatgcctttaacttcagagccccattttctagcaattttaatggctgcttcaacagcttcagtaccagagttaagggggagtactttgtctttcttagcaagatgacaaattttttcttcccatttcccgagattgtcactataaaggacacgtgaaatgatagacaactttgaagcttgttctgtcatcgctttaacaattgttggatgacaatggccttggtttgcaactgaaaaacccgaaatgcaatctatatattgtttgccatcagtatcccaaactttgacacctttacctttagaaatgacaagcttaagtggtgcataattattagagctataataatcagttaattcaatgattgaattcatcggtctccctcctttatatttatacattttaaagaattaatattaatatattacagttgttcaatataagtgtcaaatataaatttaataatataaagataaggttgtgtttgtattaatgtgatttgtaaaatgaaagtactaatattttttgtggataatcattgatatgtatgtatacgattgcagtttaatgtagtatgaataaaaaatgccacaagcatatgtttaacatatgactgtggcatagtattatgcttgtggaattttacgatgcttaattttataaataatgaagccgataatgaaaccaatcaaactgagaacaacccagcccataccaatgtctgataatggtaaatatttttggctgaaattaatcaaagtttgtgagaatgatgtgcttgaaatgaactctggactagcttttaatccatctactaatgcagcaatcattgtaaagaaaatggtacattgataaataagttttgaatgatggaatttgctactaaataatgttagtacaatcaaggcaattgctaatggatataagaacattaacactgggactgagtacataataatcttagttaaaccaacattcgcgaataagaacgaaataaagcttacaactgttgcaatcgctaggtaattcattttagggaaaaggtgttcgaatgtttctgaaaatgccgtaatcaaaccgatggctgtttttaaacaagcaaccataacgataagtgacaacaggacgataccgtagttacctaagtagtattgagtaatttgcgctaaggcaataccaccattttcactaagtttgaaatgaccaatacttaatgtacccatgattgctagtagggtataaatgatccccatcataatgatactgatagtaccagacttaattgtttctttagcgatatcagttggattttcgatacctaactttttaatcgttgcaacaatgataataccaaatgccaatgacgctagcgcatctaaggtattgtatccatctaaaaagccgttaaataaggcatgtgattgatattgtttactaataggtgcatcagatatgccacctaatggatggataaaagcaaataataaaataattgctaataatactaagaataccggatttaaaaatttaccgatatattctaaaattcttgatggctttctcgcaaaaaaccatgcaatcacaaagaagacgaagctaaaaataaataaatataaagtgatttgctttggtgataaaaatggcgaaaatgcaatttcaaatgatgtcgttgccagtctaggtaaggcgaaaaatggtccgataactagatataaggcaatcgtgaaaatgtaagcatatgttttattaacacgcgatgcaatttcaaataaaccagatgtctttgaaatgccaatagcaatgatacctagaaatggtaagccaattgctgtaattaaaaatcctaagttagcgataaaaacgttagaaccagcagcttgacccaagtgtattgggaagataagattgccggcaccaaagaataaaccaaataacatagaacctataaacatgttttctttaaatgttagtttcttcttcatatatgtatttgttctcctttttagaacttataaaaatctacttaattaagataatatcaaaaattaaacataaagtgatacataattttgcaataaatactaaattttttgaaaattccggaataaatactgttttttatgtagtaggggcgtaagttaagaacgatttaacagatatagaatatgttaaatatagaaggttagacaacccgacgtattaatactttgtgaaataaagatccccctcaacatgatcgaaggggggaagtatatgtttagttcaatatatttagaaagtcgtttgtagttattgtttgtcccatcaatgggaatacattatctattggaaattgatgtagcgtttcgttttgtgcactcatcatatctgtaacaaaaaactgattgtagtttaattgataggcatctcgcgctgtcgtatctacgccaatatgcgttgcgacaccaccaagaacaatcgtatcaattcctcgacgtcgcaattgtaagtccaaatctgttcctacaaatgcactaaaatgtcgtttgtctatgacaaaatcgtcatctctcttgtctaataaatgatggaaacgactgtagtcgtcgccttcttttggtggtaatgagatcattacatttggttgcaatacatctttaccatcatagaaattcacgcgaacaaaagcgataaagccattgttttttctaaaaacatctattaatttattagcgttttgaacgacattttcagctgtatatggggcataatccattttaagaataccttcttgcaggtcgattaacactaaagcggttttattaaaattaatcatcttatatcagagtcctattcgtttaataaagtattcgcttaaacttataccctgtatacgatgaaattatttattttgttgtgaaaaagctttagcgatatcgatgagtttcttcggtgcgtcttcgacagccattttgacttcgacaaaatgcatcacatcgggatgaccattaattgcattaaacgtgtcttgtaaatcttttgatgattcaacgtcatgaatttcaacatttttaccaccaaatacagctggtaaagctttataatcccacatgtgaatttcattataaggttcatacatgccgtgaataagtcgttctaccgtatagccgtcattattaatcacaaataataccggtttaatatgctgtctaatcatagttgaaatagcttgaacagttagttgcaatgagccatcaccaattaataataagttacgacgatctttgtctgctaattgtgaacctaatgttgcaggtaatgtatagccgatagaaccccataacggttgccctataaaagtattgtttttgtataatgctaaatcataagcaccaaagaatgatgtaccttgatcagcaatgatgacatcatttggttttaagaaattttgcatcattttaaaataagtttgttgtgttaatggttctgtgccaacagtataatcgggtgatgttggacgatgatacgcagggaacgttgcgttattcgtatatgaaatattggataactgttttaacaatgatggtagagatatttcatcatttgtaacatcgtcaattttgatattgtgatgatttaacataacgacatcatcgatattgaattggtatgaaaaacctgctgttgctgaatctgttaatttggctccaatatttaaaattaaatcgctgttgtccacataatctcgtattttatcttcggcaattttcccatcgtaaatacccatataatatggattttcctcattaaaagcaccttttcctaatgaaagttgtgctactggtatctgtgtttgatttacaaaatcttctaattcttgatggaggtgaaaactgttaatttcatgtccagtaatgatgataggctgcttcgcttgatgcagtttagttgctaataactctatatatgttgatgcatccgtatatttagttgccgtcacttcaaatggtgtcggtatctcaatttcagagattgcgacatcgattggtaaatgtaaatgaactgggcgtctttcggcgattgctgtattaattaaacgtggtatttcggttgttgcattttcaggtgtgatataaccttgtgcaacggttatatgtgcaaacatttttcgatagtcgtcaaatgtaccttcaccaagtgagtgatgtacatatttaccgccttgttcaacagcacgtgtcggcgcacctgtaatcgcaatgacaggtatgcgttcagcatatgaacctgcgataccgttgacggcacttaattcgccaacaccaaatgtagtaactaatgcagcgagtccattaagacgggcataaccgtccgctgcgtaacttgcgtttaattcatttgtatttcctacccaatctacattgggattgctgataatatcgtctagaaaagcgagattaaaatcaccaggaacaccaaaaattttatcgacgcctgctcgatgaatagcgtcaattaagtaagctccaatgcgttgtttcataaaaaaagccaccttttctctatatttacacttaaaatgatagcctcgaatatagtgtaaggtcaaggaagttgactttgttgtgaaaacgctaacaatagtgaacaattaatattttttaggaaatgagtatgaaggggggctttaattgatgatcttaaaattcaaaatttaaggggagagcgaactatcaatgatgctgcaaaatacaatagcaaagaaaaaacaggcgcgtcaccttatgaaggtatacgcacctgtttatagtaagcattatttagcttcaaataattgatcgccaaatgaaatgttgccatgttcaccttgtttaaaatcaaggtttgtaatgtttccttgtgtcacgataataggcgtaatatcactctttgcatgattgcggatgtagtctaaatcaaagttgattaataaatcaccttgtttaacttcttgaccttcctcaacatgtaaagtaaagccttctccgtttaatttaacagtgtctaaaccgatgtggattaatagttctaaaccactatctgatacaagaccaattgcatgttttgttgggaaaatcatttgtactttaccgttgaatggtgcacgaacttcaccttgtgaaggtttgatagcgataccgtcacccatcattttttcgctgaacacttgatcaggcacttctgataatggtgttacttcaccagttaatggtgcatgcacgatatggctcaattcgcttgttgcagatttatcttctgcaacaacaacagtttcgtctttatcgtcttccatagtagtaggattttctactacttgaccattcataatctgttgcatttcatgtttgatttggtcagatttaggaccaaaaattgcttgcatattattgccgacttctaatacaccagatgcgcctaaatctttcaaaccaggaacatcaactttagatttgtcgttaacttcaacacgtagacgtgtgatacaagcgtctaaatgtttaatgtttgctttgccacccatagcttctaatactgcatatggtaattcagttgctgaagcagtagccgcttgtgattgtttatcttcacgacctggtgttttgtattttaattttacaattaagaatcggaatacgaagtagtaaataactgcgtatacaagacctacaggaatgactaaccaccattgtgtcttattaggtagtataccgagtaagaagtagtcgatgaaaccacctgagaatgtataacctagatgaagatctaataagtacaatgttaagaatgataaaccatcaagtactgcgtgaataaagaataataatggtgctacaaataagaatgagaattctaatggttctgtaataccagttaagaatgatgttaaagcagcagaacccattaaacctgctactactttcttattttcaggtttagctgtgtgataaattgctaaagctgctgcaggtaaaccgaacatcataacagggaattcaccttgcatgaatttaccagctgtcaaatgtgcgccttcacgaatttgttcgataaagatacgttggtcaccgtgaataatttcaccagctgcatttttccatgaaccaaactcgaaccagaacggtgcgtggaaaatgtgatgtagaccgaatggaattaataaacgcttgatgaaaccaaataagaatacggcaacaccagtatttgaatctaataatcctgtactgaatgcatttaatcctgattgaatcgttggccaaattaatgccattgggaatgctaaaataaatgatgttgtagccatcataataggtacgaaacgcttaccagcgaagaaacctaaataagatggtaagttaatgttatagaacttgttataacaccaagctgccagggccccgattataataccgccgaacacacctgtttgtaatgttgggatacctaaaatgctagcgtaaccactcgctggatcaccaatattcttaggtgtaacttgtaaaaagtcgcccattgttttgttcatgattatgtaaccgacgaatgctgcgatagctgctacgccatcaccgccagctaatccgattgcgacacctaatgcgaaaatcataggcaagttatcaaaaatgataccaccagcacctgtcattaatttagcgacagtttgtacgccaccattttgtataaacggcaagtagtgttgtaatgattcaccttgcatagctgtaccgatagctaataacagaccagctgctggtaaaatcgcaacaggtaacattagcgctttaccaatacgttgcaattgaccgaaaagtttcttcctcacttgtccaacctccaaagttgtatttattatttaagattcaataaaaaaagacacgagcaaatagactgtgttggtaaccatcacagcttaatttaactcatgcctaatcttacttagtaacacgttggtgtatgtaattaatgtaaaagaagcaattgactaagtagtatataaaactgatacgttagtttatctagcttaccatcacatcttattgaatcttatttgtttgcgactcctattttagcatggtgaagtatgcgttttcaatacaattattaaattcaatttcaaatctcttaattgttcacagattattattaaaacataatataagataatcctgaataaaatgtataaaagttattgtaataatccagcagtagcagctattatcagcacttaaaagaaaggataatctttgatggtgtaataattaacttgtgacagaaatatgtaagattattacaatgaacaggctttaactgattaatattgtaatgtgttttctcttatagtaaaatgtaagcgattacacaaatcaactatattttcctaataattatattgttaaggagggctactttgacaggcttttcagtgtatttaggacaacctttagatgaagcgtatattaagcgaatgattaaacaaggttaccaaatgatttttacatctgtacaaataccagaagaagatgacgagacaaaatatcattatttcacaaaactactcaatttattaaaacatgaacaagtgacttacctcatagatgctaatccatctattttaacaccatctttttatgaccatcttcgacaatatgatgcacaatttatgattcgtatcgatcatagtacatcaattgaggcaatcgaagcgataatggcacagggtttaaagtgctgtttgaatgcaagtattatttcccgggaattgttaacaagcttacatcaacaattgaatgattttacattactttcattttgtcataactattatccaagaccagatacgggattatctgttgacttggtcaataagaaaaatgaactcatttatcaatttaatccaaaggcacaaatatatggttttattgtagggagtgatttgcgaggtcctttgcataaaggcttgccaacaattgaagcaacgagacatagtcatcctgtcgttgcagctaaattattacaagaaactggtgtatctgaagtgttagttggagactcattgattgaaatgaggcaggcaaaacaacttatagatttttgcaagcataggcatttcacgttatgtattgaagaagtgtttgatacgacagtgacttaccttttcgatatgtgtcataaagtacgcccggataatccggaaaatgtcattcgttcggaaacgtcaagacaaatatgtccacattcgattcaaccacagtttacgacgcaacgacgcattggttcagtaaccgttgataatttgaataacggacgttatcaaggcgaaatgcaaattgtgagacaaacgcttagtgcacatgacaatgtgaatgttgttgcacaaattattaaagaagacttaccactgttaagttgtatcgagccgaatgatacatttgattttcaaaaaactagggagtgtaagaagtgatggaaaatagtacgaccgaagcgcgtaatgaagcgacgatgcatcttgatgaaatgactgtggaagaggctttaattacgatgaataaagaagatcagcaagtcccgttagcagttcgaaaggcaataccacaattgacaaaagtaattaaaaaaacaattgcacagtataaaaagggtggacgattgatttatatcggtgcaggtacaagtggaaggttgggtgtcttagatgcagcggagtgtgtacctacattcaatactgaccctcatgaaattataggtattattgctggtggacaacatgctatgacgatggctgtagaaggtgcggaagatcacaaaaaattagcggaagaagatttgaaaaatatagatttaacatcaaaagatgtcgttataggaattgccgcgagtggcaaaacgccatatgttataggcggtttaacatttgctaacacaatcggtgctacaacagtatctatttcatgcaatgaacatgcagttataagtgaaattgcgcagtatccagtagaagttaaagttggtccagaagtattaactggttcaacacgtttaaagtctggtacagcacaaaagttaattttaaatatgatttcaaccatcacaatggttggtgtcggaaaagtttacgataacctcatgattgatgttaaagcaaccaatcaaaaactgatcgaccgttcagtgcgtattattcaagaaatatgtgctatcacatatgatgaagcaatggcgttatatcaggtatctgagcatgatgtgaaagttgcgacagttatgggtatgtgtggcatttctaaggaagaagcaacaagacggttattaaacaatggtgacattgttaaacgagcaatcagagatagacaaccttaggagggatttaaatgaccaaagaacaacaacttgcagaacgaattattgctgcagtaggtggtatggataatatagatagtgtcatgaactgtatgacacgtgtgcgtattaaagtattagatgagaataaagtagatgaccaagaactaaggcatattgatggtgtcatgggtgttatacacgatgaacgcattcaagttgtggttggacctggtacagtcaataaagtggctaatcatatggcggaattaagtggtgttaaactaggtgacccaataccacaccatcacaatgatagtgaaaaaatggactataaatcatatgcagctgataaagcaaaggcgaataaggaagcgcataaagcaaaacaaaagaatggtaagttgaataaagtattgaaatcaattgccaatatctttataccgttgattcctgcatttattggagctggattaattggtggtattgcagcagtactgagtaacttaatggtggcaggctatatttcaggtgcttggattacgcaacttataacagtatttaatgtcattaaagacggtatgttagcatacttagctattttcactggtattaatgcggctaaagaatttggtgcgacaccaggacttggtggcgtgattggtggtacaacgttattaacgggtattgctggtaaaaatattttaatgaatgtcttcactggagaaccattgcaacctggacaaggtgggattattggcgttatttttgccgtttggattttaagtattgtcgaaaagagattacataaaattgtgccaaatgcgattgatattattgtaacgccgactattgcattgttgattgtaggactattaactatctttatctttatgccattagcaggttttgtttcagacagtttagtttcagtagttaacggaattattagtattggtggcgtatttagtggatttatcattggtgcaagcttcctaccgttagttatgttagggcttcatcatatttttacgccaattcatatagaaatgattaaccaatcaggtgctacttacttattgccaattgcagcgatggctggtgctggacaagtaggtgccgcattagcactttgggtaagatgtaaacgcaacacaacattacgtaatactttaaaaggtgcattgccagttggtttcctaggtatcggagaaccattaatctatggtgtgactttgccattaggtcgacctttcttaactgcttgtattggtggtggtattggtggcgctgtaataggtggaattggacatattggtgccaaagcaataggcccaagtggtgtgtcactattaccattaatctcagataatatgtatttaggttatattgcaggattacttgctgcgtatgctggtggattcgtttgtacatatttatttggaacgacaaaggcgatgcgacagacagatttgttgggtgattaatgatgacaaatattttatatcgcattgataagcagttgagtgattttacgaagacagaaaagataatcgctgattacattttaaagaatccacataaaatcattgatatgactgtgaatgatttggcagatgttacgaatgttagtacagcatcaattgttagatttagtcggaaaatgacacatcaaggttttcaagagctaaagattgcgatatctcgatacttacccgaagatattgcaaccaatccacatttagaattgattgaaaatgaatctgtagaaactttgaaaaataaaatgattgctagagcaacgaatacgatgcgatttgtagctactaatattatggatgcgcaaattgatgcaatttgtgatgtgttgaaaaatgccaggacaatatttttatttggatttggcgcatcgagtttgactattggtgatctttttcaaaagttatctcgtattggcttaaatgtcaggttattacatgaaacgcatttacttgtgtcaacatttgcgacgcatgatgatagagattgcatgatttttgtgacgaatcaaggtagtcatagtgaattgcagtcaattgcacaggtggccacacattacagtattcccatcataactatatctagtacagctaataatccagtggctcaaattgcagactatgcattgatttatggcagaactgatgaaaatgaaatgcgtatggcggctacaacgtcactatttgcacagttattcacggtagatatattgtactatcgatttgtagcattaaattatcatgcgattctagattgtataacccaatcgaaaatggcacttgataattacaggaagcatcttgcgacgatagattttaaacattagatattgtgtgcgttctaacataaagttagttgcaacgtaaacaattgaagtttttgatgtgattcagttgcttgatgaaaaattgttgctacaagtttgtaaaactggcatagaggctattttgaaaatgataaaggcgtgacaaattaaagcaaagttcagatttgagctttgcttttttcatagatggaaattaaatgctgaagaataattttaatgctaaatgaactaatacgaaggtgctaaaagcaattattatcaaattagtgatatgaatgaaatgtttaaatcgtttgcgttgattgtattcgggacttttatagagtaggtagtagtacataaagagtatggctgcgaacatgccgaatattgaagtgaagttacctacagtgactgccatgtaatgatttaaagttaaatagtaacttagactaataataaaaaataaaatgatttgataggtaattaacaccattcaagtccctccattaatcgtagacaaaaaatttatcaatgatttgattatttgtattcaaattttagtatacgacttacctcaaagacaaatattaaaagataagacaataaaattagaataaatttacgtttgaagataaaaaacaaacatttttcattaaagtttatgatatatttagagcaatagaaagtgtatggaaggggatatgaatggcataccaaagtgaatacgcattagaaaatgaaatgatgaatcaacttgaacaattgggttacgaaagagtaacgatacgtgataataagcaattgcttgataattttagaacgattttaaatgagcgtcatgcggacaaattagaaggcaatcccttaacagataaagaatttcaacgtctgttaacgatgattgatggaaaaagtattttcgagagtgcccgtattttacgtgataaattaccacttagacgtgatgatgagtctgagatttatttgtcgtttttagatacgaaaagttggtgtaaaaataagtttcaagtgacgaatcaagtatctgtcgaggatacatataaagcacgttatgatgtaacgatattaatcaacggactaccccttgtccaagttgaattgaaacgtcgaggtattgatattaatgaggcgtttaaccaagtaaaacgttaccgcaaacaaaattacacaggcttattccgctacatacaaatgtttatcattagtaatggtgttgaaacgcgatacttttctaataatgatagcgaactattgaagagtcacatgttttattgaagtgataaacagaataaccgtatcaatacattgcaatcgtttgctgagtcatttatgagaccttgtcaattagctaagatgatatcgcgctatatgattattaatgaaacagatagaatactgatggcaatgcgtccgtatcaagtgtatgcggtagaagcacttattcaacaagcgactgagacagggaataatggatatgtatggcatacaactggaagtggtaagacgttgacttcttttaaagcgagtcagattttatcacagcaagatgacattaagaaagttatctttttggttgaccgtaaagacttggatagtcaaacagaagaggaatttaataaatttgctaagggtgctgtagacaaaacttttaatacctcgcaactggtacgccaactaaatgataaaagtttgccacttattgtaacgacgattcaaaaaatggctaaagcgattcaagggaatgcccctttattagaacagtataaaacgaataaagttgtatttattattgatgagtgtcatcgcagtcaatttggtgacatgcatcgtctagttaaacaacatttcaaaaatgcccaatactttggattcactggtacgccacgttttccagaaaatagtagtcaagatggtagaacaactgcagatattttcggtagatgcttacatacgtatttaattagagatgccattcatgatggtaatgtacttggtttctcagttgactatattaatacttttaaaaataaagctttaaaagcagaagataacagcatggttgaagcaattgatacggaagaagtatggttagcggataaacgtgtggaattagtaacacgacatatcatcaataatcatgataaatatacacgtaatcgtcaatattcaagtatatttacagtccaaagtattcacgcgcttattaaatattatgagacatttaagcgacttaacaaaaagttggaacaaccgttaacgatagctggtatatttacgtttaaacctaatgaagatgatcgtgatggtgaagtgccatatcattcacgtgaaaaattagagataatgattagtgattataataaaaagttcgagacgaatttttcaacagacacaactaatgagtattttaatcatatttcaaaaaacgttaaaaagggcgttaaagatagtaaaattgatatcttaatcgttgttaatatgttcttaactggttttgatagtaaagtactgaacactttatatgttgataagaatttaatgtatcatgatttaattcaagcgtattcacgtacaaatagggttgaaaaagaatcaaagccatttggtaaaattgtaaactatcgtgacttgaaaaaagagacagacgatgcactgagagtattctcacaaacaaatgatacggatacaattttaatgcgcagttatgaagagtataaaaaagaatttatggacgcttatcgtgagcttaaaatgattgtgccgacaccacacatggttgatgacattcaagatgaagaagagctaaagcgctttgttgaagcttatcgtttattagctaaaataatattacgtttaaaagcatttgacgagtttgagtttacaattgatgaaattggaatggatgaacaagagaatgaagactataaaagtaaatatttagctgtgtacgatcaagtaaaaagagcgacggctgagaaaaataaagtatccattttaaatgatattgatttcgaaatagaaatgatgcgtaatgatacgattaatgtgaattatattatgaatatattgagacaaattgatcttgaagacaaagcggaacaacgtcgtaaccaagaacaaattagacgcattttagatcatgcagatgatccgacattgaggttaaaacgagatctaattagagaattcatcgacaatgttgtaccttctttaaataaggatgatgatatcgatcaagaatatgttaatttcgaaagtattaaaaaagaagcggagttcaaaggatttgctggagagagatctatcgatgaacaagccctaaaaacaatttcaaatgactaccagtatagtggtgttgtaaacccacatcaccttaaaaaaatgattggtgatttgccattgaaagaaaagcgtaaagcaagaaaagccattgaatctttcgtggcagaaacaactgaaaaatacggtgtgtaatgattcagccccctcgctagattagtgtagggggcattattattttctatcttttgttagttaccatgtgtttggcaaccatcatttggtttcaatacaattttataatcgtatgtgtatagaaataatgtctataggcatttaaaatagtttataatattaacaggataagcattaaatgtatgttgaaggaggtgcgtagctatggataatagaaatatgattaatcgtgtttttagtcaaaagatattacatcaaattgcaatcaaaaataaaagtgatgttgttgatgaggcatatgatttttatatacagggacctaaaaatatcaatgtaatacagaagatgaaatctttatataactatcttaaaaagtcttatcgtaacgaatatttttacaaaaacacaatacttaataaactccttctaggacgacattctattaatacaactactgcactttctgagatgcccatagggaaaagtattgctgattttatattgttaaacggcaaaggcgttgtctatgagattaaaacagaattagataagctggatagattagataatcaaattaatgattattatgaagtgtttaattatgtcgtagttattacaaatgacaaacatctgaataaagttatggctagatacaaagatacaacagttggaattttagtgttaacaactagaaatacactgagtgaagttcaaaaacctaaagaaaacaatagtctcttaaacacaaaagcgatgtacaactttttacgaaaagaagaaagaaaaagagttattgcacaaaatcatatggatgtgccaacttataatgatttcacagagtatgatgtgttatttgacgtgtttaaagaaataccaatgacgaaactgcataacaatatgatttctgagttgaaaaaaagaggaaacatgaaagaatacaaagatgaatttttagcagcgccggctgaaattaagttcttgttatatttcgcaaaaatgacaaagaaagataaaaataaactatatcattttcttaaggaggattaatatgtattatccttatttgcgtgggaaacaaaatgaactatttgcaattagagaattgttagagaaaggtttgattggtgattgtattcaacctataattgaaccaattaaatatacaaccacatttaaaaatactttgcaatactgtggtgaaaaagcattctctataaatttagtagtaaattcaaagttaactgaagaagagattagtaacgaaactgttgcacatttaactgaaataataacaaaaaacaaaagtgttattcaaaaagcttacttgggtccttctgatgaaggcaatgataggttgaaacagcaattttcaagtaatagtttagctattttaacaagtgtagatgattgggaaatgtttggagataaaaataaacttgaaatggtttttgtaccagatgatagacacattaaacgtaaattgcgtaatattccaaacaaaggcatcattatggatccttttaataaactaagtcgtaatgttgattatttagataatgatgacgagttttatagcgacgatcacctttattataaggaagatggatacgtagcattttcagactattctgttataggtggagaatatgtagacggtggcttttcgccattagctattgcgatacatattgtctattttgatgaggctaatgagctaagagttaagcattttgtctctgattctaataatgatagatcaaatccaggtaaaaagttttttgaggctgtagataaattagtaacatggtcaaaaaacttagatattaaaaatagatcttatgcgcttggacaatttgaagaattaaatgaaaataataagtatccaggattaggtttaattaaaaggttatctatcatgcatcacctagaaattatgaatagatacttggagtctcaaaatgaaaatatgtgaaaaatgttttaataatactgaaatcgtagaaatcattgcaaatgataatagcaaatttgacaattgtgatattgataacaatcatcttggtgttaaaatatttgatacgactaaggacatagataaattagaacttattagagattatttaagaccagcattagaattatatgatattagtataaatttaccagatacttttagcccaaaagaaggtaaaaagattgaaatagcattaaaagacgactggagtatatttaatgttgaggaagctcaaataagttgtattttaaatgaactttttaaagatgatgaaaatttagatagacgagtgttggaagatttagtaggcgctaaaatcataaacgataaaaaatatacaaataaaaatctaattgtagcaaataatgactgggatggattttgtgagagcttgaagtataaaaatagatttcataaaaatatgatcaatttagagaatttagcgttctttctcgatatcactactaattactatagtattgaggaatttagagaaagatttgaaccattatatagatctagaatagttaagttcattacagagaaaagtgaactaatgtcaccaccaaagggatttgcaacggcaggaagattgaattctaaatggataagcgtattataccttagtacaaaagaacaggtcagtatagaagaagttaaacctaagcataatgacattatttatataggtaaggttaagttacaaaaaaacgtgacaaaagagaaattgaaaattgcgaatttaactaatttaactagtaatgcaatcaaagctggcgatgatggatttagaaagtattttgtaaattaccaaacattaaaaaagattcataaaggaataacaaatccaagcgatgaacaaggaatagattatttgccatttcaatatttagctgattatattcgaagccttaaatatgacgggataatgtatgagagcatattacaagatggtacttttaactttgtgttttttgatcaaagtttatttgaatgtgttaattatgaaagaaaaagagtaagtgacgttaaatatacattgactaagctaagttgacacactcaaaaatctgaatattctaataaaatataaataatcccccacacttcacatagtggcgggggatttattctggcgttaaaatgcccaaagtatgggggtgactcttaaatcatggcaaagcacctaaaacttgatatggtgccgagccctaacttagcacaatatagttagtatgacaaagtcatctaacataacacatcagaagtcgcgcaatttatttcagaccatacagtgataaagttgcacaacgcatgacttttatttagcaataactgctacttctgaaataagttgctttgcatagtctgactgcggatgtttgataatatcttctgtgttattcagttcaacgatttcgccatttttcataactgcaacgcgatcacatatttcattgataacacccatgtcatgtgtgatgaataaataagtgatgccgaagtctaactgtaattgttttaataactcgatgatatctttttgaattgaaacgtctaaagcggacactgcctcgtcgcaaacaatcactttaggttcaacagcaagtgctctcgcgatacttacacgctgacgttgcccaccagataattcgtgtggatagcgatataagaaagtttgatctaggccaaccttttctaacaacgatacgacagttttaataatgtcatcattatctttgactttcccatgaatgattagtggtcgtttaatcacatcaatgactttaaatcttggattaatagatgcgaatggatcttgaaaaatcatttgtatctcttgtcgtaaagatttcaattcatcatctttaaataaacttaatggtaattcgttataccaaataaagccttctgacacttcctttagaccgacgaccgtcttagctaatgtcgatttccctgaccctgattcaccgacaatgcctaatgtttcgccttttctaatagccaagttaatatcattaactgctcggtataggctgccactcggtgatgtgtaatccacgctcacgcgatcgaattttaataaaatatcattgtttaacggtcttggcggacgcgtttgatgaatatcaggaatcgcatctattaagcgttttgtataggtatgttgtggcgatttaaaaatactttcaaccgtgccactttcaacgacacttccatctttcattacaatcacatcgtcgcaaaattgatacacagcgcctaaatcgtgagtgataaaaataatagatgtttctgtgtactcataaagggacttcattaactgcagtaattgattttgtgtactggcatctaatgccgttgttggttcatctgcgattaaaatttgtggctttaaaatcaatgccattgctatcatgacacgttgacgcataccaccagaaagttcatgtggataagcatcaaattgtcgagttgcatgttttatacctactttttctaaaatgtctattgtcatcgactttgcttcagatttagatacacgtttatgttgaaatattacttctgtaatttgtttgccaatcgttaatcttggattcaacgaagagagtggatcttgaaaaatcattgaaatatccttacctcgaatttgttgtaacgctgaagttgataaattatttaacgattgcccattaaaaataatttctcctgttaatgtgtgatctggataatctggtagtagccctaaaatagatttagcggtaatactttttcctgatcctgattcaccaacaatacctaggatatgtttttttcgtaattcgaaagagacgttttttaccgcttgaactgtagtttcatcataattgaattgtacattcagactgttgacttctaataaatttgacatgatgttgtgcctccctattcacaaatgtgtaaatttattctatacttttgtatatcatagtaatctactcaagattattttacaaggagtgattatcataattacttatttagaatcttttaagtcgttgtatcacaaggcattttacaagtttgtattatcggtattaagcttgccaatatttttatatgcagtgataaagtttttcttttctgctaagaggaaaaatttttacgctaataattctgaaatttcagaaattgaacaggcgttacatcaaaaatataaatatttatcgcagcaaaagtcatccacacaaatacataaagaagcattaaaaatattcaaggcacaaagttctaatacgagttcaaagaatattgaacaagcacatttttcaacatactttgaaaatgtattatttcataagttcatcatgatcaaagtgatattggccttgccgatgttcatcttattgactttttatttacagccattagttagatatatttttgaacgaattgtcatggctgtgattgtcatcattggtgttattgtcagtgtgtttaccattctgtatttttcaccgcttgatgcggcttatagcatactgggacaaaatgcaacaaaggcacagatacatcaattcaatgtattacatcatcttaacgaaccttattttattcaattgtgggataccatcaagggtgtttttacctttgacttaggtacgacttacaaagggaatgaggttgtgactaaagcagttggcgaaagaattccaattacaataattgtcgcagtattagcgctaatggtggcattaattattgcaataccaattggtattatcagtgcgatgaagcgaaatagttggcttgatatcacgttaatgataattgcattaattggtttatctattccaagtttctggcaagggctattattcattttagcgttctcattgaaattggatattttgccaccatcttatatgccagaacatccaatatcgttgattttacctgtacttgtcattggaacaagtattgctgcttctatcacgcgtatgacaaggtcttctgtacttgaagtaatgcgcagcgattatgttttaactgcttatgcaaaaggattatcgacgacacaagttgttattaaacatattttgaaaaatgccattattccaattgtaacgttagttggtcttctagtggcagagttactaggcggttcagcagtgacggaacaagtatttaacattaatggtatcgggcgttatatcgtccaaaaacaactaatacctgatattccagcagtcatgggtggggtcgtatatatatcaattgtaatatctttagcaaacttaattattgatatattttatgctttaatcgatccaaaattacgtagtgaaatcaacgaaaggaagtgaggcatatggcacaacttaattcaaagatagcttccttaaaattattcgcaagttacgccatagcaacttatattttagttatattaacgagtgcattaaatctttttaaaggttatgtggccgatacgttctatattgctgaaacattgctaatcgttttaaccatcattttaattattattttaacaacggaacaaacatggaagcatcatgacctatggcgacgtatcgtcgaagtgttgttattgttgatgacattaacaggcaacgtatttacattattaatgtttgtaagtattagacgttaccaacgtacatcgcaaatacatagttataacgggtgggaatcgtttatacgaaaaactactagacatcgtattgcgattatcgggttacttattttagtctacatgctgacattatcaattgtgtcacaatttacatttgatacgacattggctactaaaaatcagttcaatgcactgttacatggaccgagtctagcctatccgtttggtactgatgatttcggtagagacttatttacacgcgtagttgtaggaacgaagctgacattttcaatttcaattatttcagtagttattgcagttatttttggtgtgttactaggcactatcgcaggttattttaatcatattgataatttaataatgcgaattttagatgtagtgtttgcaattccatcattattgttagcggtggcaattattgcatcatttggagcaagtattccaaatttaattattgctttaagtatcggtaatataccatcatttgcacggacaatgcgtgccagtgttttagaaattaaacgcatggaatatgtagatgcagcacgtatcactggtgaaaacacttggaatatcatatggcgttatattttaccgaatgcgattgcgcctatgattgtacgtttttcattaaatataggtgtggttgtattaacaacaagtagtttaagtttcctaggacttggtgttgcacctgatgtagctgaatggggcaacattttacgtaccggtagtaactacttggaaacgcacagtaatttagctattgtacctggtgtttgtattatgttcgtcgttttagcatttaattttataggtgatgcagtgcgtgatgcactagatccaagaattcattaaaaaggtagggatagatgtgaagaaaatcattagtatcgcaattatagttttagcgttggtattaagtggttgtggtgtccctacgaaatcagaagtggctcaaaagtcatcgaaagttgaagtgaaaggcgagcgaccaacaatacatttcctaggacaagcaagttatgaaaatgatatgaatatcgttaaagatcaattggaaaatgcaggatttaacgtgaagatgaatatccaaccagattatggtagctatcgtacacaacgtcaagccggcaattatgatatccaaattgatgactggatgacagtgtttggtgacccgaactatgctatgacggcattatttagttctacaggatcaaatagtttattgaaagataaacatgtagaccagttgttaaataaagcttctactcaaaatgaagcagatgttaaacaaacatataagcaaattgaagatgaagttgtatttgataaagggtatatggcgcctttatatggatcaaaaaagaatttagtatatgacaataaagtgttagataaaaatagtgttggattgccaaattcacgtgcattaatatggcaacaatttgattacaacaatagtagagaacgagatacgcggccacttgtgatgacacaacaagatggtgaaattcctacattggatccaatacgttcaattgcgccgtcagtatattcaattaatatgaatatgtacacaaggttattattattagatgaaaatgatcatttaacaacgaaaggttcgttaagtcatgattatgctgtgaataaggacaataaagcattttatttcttgttaagagatgatgattattttgcgaaagtggtcaatggacaagcacgtaatactggagagcgtgtatcggctgaagatgttaagttttctttagatagagcacgtgataaaaagtctgtgcctaacaataatacttacaatatgcacaaacatataaatgacatcaagatattaaaagatgaggacatcgatcagttgcgtaaagagaaagacaaggacgataaatcaatctatgataagttgattaaagcttataacgtcaaatcgttaacgacagatggtcaaaaagtaaataataaagacggtatttatcaaattgttaaaattacgacagatcaatcgatgcctcgagaggtaaattacttaacacactcttcggcaggcattttatctaaaaaatttgttaatcaagtaaatcaagaatatccaaaaggatatggggatagcagtacaattcctgcaaattcagatgggaaaaatgcgctgtatgcaagtggcgcatacattatgacacagaaaaatgcatatcaagcaacgtttcaacgtaatccaggattcaacgaaacagaaaaaggtagttatggaccagctaaaattaaaaatattacattgaagtttaatggtgacccgaataatgcattgtcagaacttagaaatcattcaattgatatgttggcagatgtgaatcaaaaacattttgatttaattaagtcggataaaaatttaagcattattcgcaaaaatggacgcaagtcagtctttttaatgctaaatattaaaaaaggtatatttaagacgcatccaaacttgagacaagcagtagttaatgcgatagatcaggatcaatttattaagttttatcgtggcgataaatttaaaattgcatcaccgattacaccacttgtcgatactggtaacgagcaacgtcaagatttagaaaaagtagaaaaagccattaatcaataatgttttaaatatttaacagaaagtaggaggatatagtatggtcattaacttaaatgacaaacagacaaaaacatctaaagaagggttaatttccgtatcacatcctcttgcggctaaaattggtaaggatgtattagatcaaggtggcaacgccatggatgcagtgattgcaattcaactggcattgaatgtggtagaaccatttgcatcaggtattggtggtggcgggtatttgctatattatgagcaaagtactggcagtataactgcgtttgatgcacgtgagacagcacctgaacatgtagacaaacaattttatctagatgattcaggcgaatataaatcattttttgatatgactacacatggtaaaactgtcgctgtgccagcaattccaaagctgtttgattatattcacaagcgttatgctaaattgtcattggaagatttaattaatcctgcaattgaactagccattgaaggtcatgcagccaattgggctactgaaaaatattcgcgccagcaacacgcacgattgacaaagtatcatgaaacggcacaagtatttacgcatgaaaatcaatattggcgtgaaggtgattggattgtacaacccgaattaggtaagacatttcaaatattaagagaacaagggtttaatgcattttataaaggtgacattgcgaaacaattagtcaatgttgtcaaagcatgtggtgggacaatcactttagaggatctagccaaatatgacattcagattaaagcgccaatcagtgcaacatttaaagactatgacatttattcaatgggaccatctagttctggcggtatcacggtaattcaaatattgaagttattagaacatgtcgatttaccatctatgggtccaagatctgttgattacttgcatcatttgatacaagcgatgcatttagcatatagtgatcgtgcgcaatacttggcggatgataattttcatgaggtgcctgtacagtcattaattgatgatgattatttaaaagcacgcagtacgctcattgatagcaataaagcaaatattgatatagagcatggtgttgtgtctgattgcattagtcatacagatgttgaagaaaatcataccgaaacaactcatttttgtgtgattgataaggaaggtaatattgcttcatttacgacatcaattggtatgatttatggttcaggtatcacgattccaggctacggtgtgttattgaatacgacaatggatggctttgatgtagtagatggtggtattaacgaaattgcaccatataaacgaccactaagtaacatggctccaacgattgtgatgtatcacgggaagccaatattaacagtaggtgcacctggtgccataagtatcattgctagtgttgcgcaaacattaatcaatgtattagtgtttggcatggatattcagcaggctatagatgaacctagaatttatagtagccatcctaatcgcattgaatgggagcctcaattttcacaatctacaatattagcattgattgcacatggacatgcaatggaacataaaccagatgcttatattggagatgtacatggactacaggttgacccaacaacgtatgaagcttcgggtggaagtgatgatactagagaaggcaccgtaatgggtggcgaggtgttagtgattagaaaacagccattaccatatcggcaaatgtatgatagtgacggctttcgtctatatttcaatgatgtgcagttacctttattggcagatcaagtgcgatggatgcatgacaaatattgggttgatgaaagtgttgttagaatcattttccctgaagttagtgcacatattgaagatttaagaagttatgaaaacgcaggagaaaattatatagatattgcctggttagcacggaaatatgcttatcaagtaacattgaaggatgacggtttatacttaactgatgatacatatacttcagtgaaacggaacacaaatgcatactatagatatgatcgagatagtatcacaagatagtttatacgcttgatatgaagtttgtagtggatatgagcttttgttgaatgaaaggattcgatttcgaactttagcgtgacgcttgagtgtagtaatgttggaaatgctatacgaaacgctagtcacctttgtaaaatatacaacgcctcacaaattcgtttttgatgtacatcacaatagttagcctaaaatctaatgtaatgtggtttggtacagttgaacgagttatgtgaggtgtttttataatataggattttaatagatgatttggatgtttctataattacagcataagtattaatgttcacttattttattataagtaaggctttctttataaatgatttggtcttttccaggacttgaaaaataaaaataaagtttctgatcttgatgattattgccttttaaatcactcattccctttaattccacctttgttgatgcgtttttaggaatattatatctacgttttaattgtttaacgtttggattatcgttcgacaacttaccagataaattataataatcagtggtaggatcatgtgtgactttcaaatcattgctatttaaaatgcttgttaaatcaccactttgaatcaaaaattgattgttttcgattttttgtttcagcgcgggatcttttacgtcttttgtgaaaacgattttattattaactacttttactggataacttttgtatgtcgagtcagtagcattttttctatcgtttgtagttgtgtcatattcaccagttattttatgtgtgttcttatctacctttaacaacatacggtcttcttttaaaagctcatctgatccaacaactgaataagaggattctatataccatgtgtcttgatcattattttcataatggggattatcgtgaccatcaatttcataaagcgtttctaagtttttaataggatacgtacttagtacttttttaagaccatctttcaaatgaatttgttcccacttcattgccaaaaacatatcgccactgactacaattgaaataataataattgctgctaagtttaaccagaaaattttatgtgctttcatacattcccaccgtttctcaaaatacttcattaacactataataatatattttgaaaaatatttacatcagtattaaagtgaatatcaaattttaaatttatgaaaataatagatatttataaaaagcggaaaagagatacaataaaaaactgcatgacgtttgagacgtcacacagtgtaactaaaaatttaaaaagttgttgctaatttttcagcattattaatactagttgctttaatttcttcagtcttatgaggttcagcattgtgtccttcaataatgattgtttcatatgatggcacacctaagaatgtcataattgttcttaaataacggtcacccatttcaaaatcagcagcaggtccttcagtataatatccaccacgtgattgaatgtgtaatacttttttgtcagttagtaaaccttgtggtccttcagcagaatatttaaaagttttacctgcaattgaaatagcatcaatatatgctttaactacaggtgggaaagaaaggttccacataggcgttacaaatacatatttatctgcacttaaaaattcttctaaaatgtcactcaatcttgaaactttcatttgttcatcatcagttaacgtttcgccattactcatttttccccaaccagttaatacatctttgtcaataactggaatataagtttcaaataaatcaatatgtttcacttcatcatcaggatgttgttgttgatatgtttcgataaatgctttaccagccgccatagaatttgataccagttcattaaaagggtgtgctgtaatatataatacttttgccatttgaaaattctcctctgtttctgttattttcttaagtataattattatactcgatataaaatttaatatcaatcaaaatattcaaattaccatcattttcttcatctatatttggcagtactactaaagtatgagtgcatttaattatgaaatagttgatttagaatatatacttaatacccaaaatatatgaaggatggatgccactatgacaaagcgaccaaaacgtattttggcaacaattatcatttttctttcactattatttacgattatttatatagatgacattcaaaaatggtttaaccaatataccgataaattgacacaaaatcataaaggacaaggacactcaaaatgggaagacttttttagagggagtcggattactgagacttttggtaaatatcaacattcaccatttgatggtaagcattatggcattgattttgcattgccaaaaggtacaccaattaaagcgccgacgaatggtaaagtaacacgtatctttaataatgaattgggcggcaaggtattacagattgccgaagacaatggagaatatcaccagtggtatctacacttagacaaatataatgtcaaagtaggtgatcgagtcaaagcaggtgatattattgcatattcaggcaatacaggtatacaaacgacaggcgcacatttacattttcaaagaatgaagggtggcgtaggtaatgcatatgcagaagatccaaaaccgtttatcgatcagttacctgatggggaacgtagcctatatgatttgtagttatagaagggtgcccgcagtctaaaaaattaagcaatcattgtgtgagtatgatacttacataatggttgcttttttcaatgaaaatcgtaatgctaagtcatacttgtttgatttagatattacttaaaatgtaagacaaggttgttagcattggcagtgaaatatcgcacataaaaaacattattgtcacactagaaaatagttgtgcactatatcaattttctgtataaaagtttaattctgacagtaatgtaaacgtttacaatttatgattgacattaataatgactgaatatatgatttatgtaagtatttgtgcaaacgttttcacaaagtgtattgcacaatcaaactgtaaacaaagtatgggaggcataacatggcagaactaaagttagagcatattaaaaagacgtatgataacaacaatactgtagtgaaagattttaatctacatattactgacaaagaattcattgtatttgttggaccatcgggatgtggtaaatcaacaacattacgaatggttgctggactagagtctatcacatctggagatttttatattgatggggaacgcatgaacgatgttgaaccaaagaatagagatattgcgatggtatttcaaaactatgcattatatccacatatgactgtttttgaaaatatggcatttgggctaaagctacgtaaagtaaataaaaaagagattgaacaaaaagttaatgaagcagctgaaatattaggattaactgagtatcttggtcgtaaaccaaaagcgttatctggcggacagcgtcaacgtgttgctttgggcagagctattgttagggatgcgaaagtctttttaatggatgaaccattatcgaatcttgatgcgaagcttcgagtacaaatgcgcacagaaatattgaaattacataagcgacttaatactacgacaatttatgttacacatgatcaaactgaagcattgacgatggctagtcgaattgttgttttgaaagatggcgacattatgcaagtcggcacacctagagaaatatatgatgcccctaattgcatatttgtggcgcaatttatcggctcaccagcaatgaatatgttgaatgctacagttgaaatggacggattgaaggtaggaacacaccattttaaattacataataaaaaatttgaaaagttaaaagctgctggctacttagacaaggaaattattttaggtattcgagctgaagacattcatgaagaaccaatatttattcaaacttctccagagacacaatttgaatctgaagtagttgtatccgaactgttaggttcagaaattatggtacatagcacattccaaggaatggaattgatttctaaattagattcaagaactcaagtgatggcgaacgacaagattacactagcatttgatatgaataagtgtcacttttttgatgaaaaaacaggaaatcgtatcgtctaagggggagtattcatgtctaaaattttaaaatgtatcacgttagccgtggtaatgttattaatcgtaactgcatgtggccctaatcgttcgaaagaagatattgataaagcattgaataaagataattctaaagacaagcctaaccaacttacgatgtgggtggatggcgacaagcaaatggcgttttataaaaaaattacggatcaatatactaaaaaaactggcatcaaagtaaagcttgtaaatattggtcaaaatgatcaactagaaaatatttcgctagacgctcctgcaggaaaaggtccagatatctttttcttagcacatgataatactggaagtgcctatctacaaggcttagctgctgaaatcaaattatcaaaagatgagttgaaaggtttcaataagcaagcacttaaagcgatgaattatgacaataagcaactagcattgccagctatcgttgaaacaaccgcacttttttataataaaaaattagtgaaaaatgcaccgcaaacgttagaagaagttgaagctaatgctgccaaactaactgatagtaaaaagaaacaatacggtatgttatttgatgctaaaaatttctattttaattatccgtttttattcggcaatgatgattatattttcaagaaaaatggcagtgaatatgatattcatcagctaggactaaattcaaaacatgtcgtcaagaatgctgaacgattacaaaaatggtacgacaaagggtatcttcctaaggcagcaacacatgatgtcatgattggtctttttaaagaaggaaaagtaggacaatttgtcactggaccgtggaacattaatgaatatcaagaaacgtttggtaaagatttaggagtaacaacattacctacagatggtggcaaacctatgaaaccatttctaggtgtacgtggttggtatttatctgaatatagtaaacataagtattgggctaaagatttaatgctgtatatcactagtaaagatacattacaaaaatatacagatgaaatgagcgaaattactggacgtgttgacgtgaaatcatctaatccaaatttaaaagtgtttgaaaagcaagcacgtcatgctgaaccgatgcctaatattcctgaaatgcgacaagtttgggaaccgatgggcaatgcaagcatatttatttcaaatggtaagaatcctaaacaagcgttagatgaggcgacgaatgatataacgcaaaatattaagattcttcatccatcacaaaatgataagaaaggagattagttatgacgaaacgtaaccctaaattagcggcattattatctgttatacctggtttgggacagttttataataaaagacccattaaagggacgatattttttatctttttcatcagttttatttctgttttttatagctttttaaatattggtttttggggattgttcacattagggacagtacctaagttagacgattctcgtgtcttacttgcacaaggtattatttctatcttactcgttgctttcgcaatcatgctatatatcattaatattttagatgcatatcgtaatgctgaacgatttaatcgcaatgaggaaataaaggatccgaaggcgcgtatggtggcaacatgggacaagacgttcccatacttactaatctcaccaggtacattcttattgatatttgtagttgtatttccattaatatttatgtttggagtagcatttacaaattacaatttatacaacgcgcctccgagacacacattagaatgggttggtttagataactttaaaacgttattcacaattggcgtttggcgtaaaacatttttcagtgttattacttggacattagtatggacgcttgttgcaacgacacttcaaattgcattagggctgtttttggcaattattgtaaatcaccctgtcgtcaaaggtaagaaatttatccgtactgtgttaatcctaccttgggctgtaccatcatttgtgacaattttaatatttgtagcgttatttaatgatgaatttggtgcgataaataatgatattttgcaacctttattaggtgtagcaccagcatggttaagtgatccgttttgggcaaaagtggcattaatcggcattcaagtatggcttggattcccatttgtctttgcactgttcactggagtactgcaaagtatttcatcagattggtacgaagcagcagatatggatggtgcgtctagttggcaaaagtttagaaacatcacattcccgcatgtcatttacgccacagcgccattgttaattatgcaatatgcaggtaatttcaataattttaatcttatttatctatttaataaaggcggtccaccagtgtcagggcagaatgctggtagtacagatatcttgatatcttgggtgtataatctgacatttgagtttaacaacttcaacatgggtgcagttgtgtcattaattattggatttattgttgctattgtcgcatttattcaattcagacgtacaagtacgtttaaagatgagggaggtttataagatgacaaagaagaaaaacatattaaaagcaatcggtatttacagttttatagcgatgatgtttgtcatcattttatatccactactgtggacatttggcatttcccttaatccaggtacgaacttgtatggtgccaaaatgataccagacaatgcaacatttaaaaattatgcattcttactattcgatgacagtagtcaatacctgacttggtataaaaatacgcttatcgtagcatctgcaaatgcactgtttagtgtgatatttgtcacgttaacagcatatgctttttctagatatcgctttgttggtcgtaaatacgggctgattacatttttgattttacaaatgttccctgtattaatggcaatggtcgcaatctatattttgctaaatacaattggattattagattctttatttggactaacactggtatatattggtggatcaataccgatgaatgcctttttagtgaaaggttacttcgatacgattccaaaagaacttgatgaatctgccaaaattgatggtgcagggcatatgcgtattttcttacaaattatgcttccattagctaagccgattttagcagttgttgctttgttcaattttatggggccatttatggactttatattacctaaaatactattaagaagtcctgaaaaattcacattagcagttggattgttcaactttattaatgataagtatgcaaataatttcacagtgtttgcagcaggggcaattatgattgcagtacctatagcaatcgtattcttgttcttgcaacgctatttagtatcaggtttaacaacaggtgcgacaaaaggttagtttgaaattaggagtggggcagaattgataaagaaccactaatgacgataaagattaaaaggaggacgttatgatgacgattaaagttggaatcattgggtgtggtggtattgcgaatggcaagcacatgccaagtttacaaaaagttgaaaatgttgaaatgatcgcattttgtgacgtagacatttcgaaagcagcgagtgcggcagaagcatacggaactgacaatgcaaaggtttatgatgattacaaagcattgttaaaagatgacacgattgatgttatccatgtttgtacgccaaatgactcgcattgtgaaattactgtagcagggttgcatgctggtaaacatgtgatgtgtgaaaaaccaatggctaaaacgacagcagaagctcaaaaaatgatagatacagctaaatcaacaggtaaaaaattaacaataggttatcaaaatcgtttccgagcagatagtcaatttttacatcaagcagcgcaacgtggcgacttaggagacatttacttcggaaaggcacatgccattcgtcgtcgagcagtaccaacatggggtgtctttctagacgaagaagctcaaggtggaggaccattaatcgatatcggtacacacgctttagatttaacgttatggatgatggataattatgaaccagaatcagtgatgggttcaacattccataaattaaataaacagcatcatgcggcaaacgcttggggttcatggaatccagatgaatttacagttgaagattctgcgtttggatttattaaaatgaagaatggagcgacgatcattttagaatccgcttgggcgattaattctttagaagtggatgaggcaaaatgttcattatcaggaactaaagcaggtgctgatatgaaagatggtctacgtattcatggtgaagacatgggtacactttataccaaacacgttgaattggaaaacaaaggcgtcgacttttatgaaggtaatgaagtggatgaagctgaagaagaagcaaaagcttggattgatgcagttgtaaatgatactgaaccagttgtgaaaccggaacaagcaatggtagttacaaaaattcttgaagcgatttatcagtctgcaaaatcaggcaaagcaatttactttgaataacatcatacggtaaggaggcacatcatgacaaaattaaaagttggtgtgataggtgttggtggtattgcacaagaccgtcatattccagcattgctgaaactcaaagacacagtctcattagttgcagtacaagatattaatacagtgcagatgattgatgttgcgaagcgctttaatatacctcatgcagttgagacacctagcgagctgtttaaacttgttgatgcggtggtcatttgtacacctaataaattccatgctgatctttctatagaagcattgaaccatggtgtccatgtattgtgtgaaaagccaatggcgatgacgacggaagagtgtgatcgcatgattgaagcggctaataaaaatcacaaattattaactgtcgcatatcattatcgtcacacagatgtggcaattactgctaaaaaagcaattgaatcaggtgtggttggtaaacctttagtagcacgtgtacaagcgatgcgtaggcgtaaagtgcctggctggggtgtttttaccaataaagcgttgcaaggtggcggtagtttaatcgattatggttgccacttgttagacttatctttgtggctactaggtaaagatatggtgccgcatgaagtgctaggaaaaacatataatcaattgagcaaacaaccgaatcaaattaatgattggggaacatttgatcatactaaatttgatgtcgatgatcatgttactagttatatgacatttgccaatcgagcaagcatgcagtttgaatgttcgtggtctgcaaatatcaaagaagataaggttcacgttagtttatcaggagaagatggcggtatcaatttatttccatttgaaatatatgagccccgctttggaactatttttgaaagcaaagctaatgttgagcataacgaagacattgctggtgagagacaggcgcgtaactttgtcaatgcgtgtttagggatagaagagattgtggtgaaaccggaagaagcacgcaatgtaaatgcccttatagaagcgatttatcgtagcgatcttgataacaagagcatacaactttaatgattatcatatatgatacaaaattctcaatataaaaagaaggagtgcttttcaatgaaaataggtgtattttcagtattattttacgataaaaattttgaagatatgttagattatgtctcagaatctggattggatatgattgaagttggaacaggtggtaacccaggagataaattttgtaagttagatgagttgttagaaaatgaagacaagcgccaagcatttatgaagtcaatcacagacagaggcttacaaataagtggtttcagttgtcataacaatccaatttctccagatccgatagaagcgaaagaagccgatgaaacgttacgtaaaacaatccgtttagcaaatctattagacgtgccagttgttaatacattttctggcattgcaggatcagatgataccgctaaaaagcctaattggcctgttacaccttggccaacagcctactctgaaatttatgattatcagtggaatgaaaagttgataccatattggcaagatttagctgagtttgcaaaagagcaagatgtaaaaattgccatagagttgcatgcaggatttttagtgcatacaccatatacaatgttgaagttacgtgaggctacaaatgaatatatcggtgctaacttagatcctagtcatctatggtggcaaggtattgacccaattgctgcgattcgcatattaggccaagcaaatgcaattcatcacttccatgctaaagatacgtatattaatcaagaaaatgtaaatatgtatggtctaactgatatgcaaccatatggtaacgttgcgacaagagcatggacattccgtacagttggttatggacatagtccatatgtatgggcagatatcataagtcaacttattattaatggatatgattatgtattaagtattgaacatgaagatcctattatgtcagtagaagaaggtttccaaaaagcttgtcaaactttgaaatctgttaatatttacgacaagccagcagacatgtggtgggcataatacgaactcgaggttagtctgaagtttgtctgaagtaagactggtggcagtgttgaataaatgcatatgtcgccaagccattgccaaaaatttcacaccttaaatcaagtcattgtttgtaaagaaggtgtactttatataagtatatagcgatggtcatacccattcacagtaacaatcctcaccattgaaaagagtatataaccttttcaatagtgaggtatatgataataaaaaaaagcctgttgtcacaatggtcatagacacgacatactttaaaggtttctgaatataatatttcagaatgcactttaaagatggacgtcgatgtagactaaagtgatgacaggctttcatctttttaaatattcattaatttctcttcttgtttaatacgtacatataagaaatacgcatacggtactaataaaatagttgtatatgttgcgtgtgttaataataatacaccgattaattcaggaatgatgtttaagaagtaatttgggtgttttgtaattttatataatccagatttaataataggatggttaggtaaaatgaataattttaatgtccaaataccacctaaagttttaataaccataaataacatgatataagcaaagattaatataactaagccaataccatttgcaaagctaaatgtatctttattaataaatgcctctacaccagccaatacataaattaaaacgtgtgttattgctaaaaacttcgaatttttaacgccatattcaactgcaccgtctgcttttaattgttttgagtgattaatagatatctttaagctgacaagtctgatacagaaaaagataagtaatatagatagaatcatgatgtcctccgtcattatgtcatatgtataagcgttgattttgacaacataaagtattttatagataaagcttgtcaaatactattaactatttattaattttagtacataaatatgtttctaagtatgtgtttatgttcagtattttggataatttaataattttaaggatattaagcgcttacaccgacgtgatatatttggcttaacgaaaatgattgaggtgacagagatgaacttttttgatatccataagattccgaacaaaggcattccattatcggtacaacgtaaattatggcttagaaacttcatgcaagctttcttcgtagtgttctttgtttatatggctatgtatttaattcgaaacaactttaaggcggcacaaccgtttttaaaagaggaaattggattatctacattagaacttggttatatcggattagcatttagtatcacgtacggtttaggaaaaacattacttggatattttgtcgatggacgtaacacaaaacgtattatctcgttcttacttatcttatctgcgattacagttttaattatgggatttgttttaagttactttggttctgtaatgggattattaattgtactttggggacttaacggggtgttccaatcagttggtggacctgcaagttattcaacgatttcaagatgggcgccaagaacgaaacgtggccgatacttaggattctggaatacatcacataatatcggtggtgccatagcaggtggtgttgcactttggggtgctaatgtattcttccatggaaatgttatagggatgttcattttcccatcggtgattgcattacttattggtatcgcaacattatttatcggaaaagatgatccggaagaattaggatggaatcgtgctgaagaaatttgggaagagccggtcgataaagaaaatattgattctcaaggtatgacgaaatgggagatctttaaaaaatatatcctgggaaatcctgttatatggattctatgtgtttcaaacgtctttgtatacattgtacgaatcggtattgataactgggcaccgttatatgtgtcagagcatttacactttagtaaaggcgatgcagttaatacgatattctactttgaaattggtgcattagttgcaagtttattatggggctacgtatcagacttattaaaaggtcgtcgtgcaattgtagctattggctgtatgtttatgattacatttgttgtcttattctacacaaatgctacaagtgtcatgatggttaacatttcattgtttgcattaggtgcgttaatctttggtccgcaattattaattggtgtatcattgactggttttgttcctaaaaatgccatcagtgtagcaaacggaatgacaggttcattcgcgtatctattcggtgactcaatggcgaaagttggtttggcggctattgctgatccaacacgtaacggtttaaacatctttggatatacattaagtggatggacagatgttttcatcgtcttctatgttgcattattcctaggcatgattctattaggaatcgttgctttctatgaagaaaagaaaattagaagtttaaaaatttaatataaatcggattaaaagtatcgccaatctattgcaatatagttggcaatcctgccccgacggcatgtgcgtgaagagatgaaagatactgcttctacccttgcaaatatatcatctctatgtctcggggcagatcataattccctgttatgaagtatccttatttgcccgacttagggtgactcaatgaatttactccttacaataaagacatatagcggtgtcaatattgtagggagtattgttttatatttaaactctctaaaaagcggactgaaagaaaagtgaaaacttctctatcagtccgctttttcatagaacaaaatggaggcgccataatcattagttatgtgctaatctattttgcttgcttacaataatcacttggcgacatttgtaaatattttttaaaatgatagctaaacattttatactctgaaaagcctactttgtctgcaatttcatagtgtttgtaatgtcgatctaacaattgcagagattgtaaaatacgatagcgatttaaataatcgacaattgtaataccaacatgatctttaaatgttcgcatcgcatacgattcactaacatcgatatgttgaattaaatctgaaacagtcactttcgtttgataagattgcttaatttgatccacaatctggtttacataataatcatcgtattctacttttaatagtggttggaaggcatcatgacaagatgctaagctacggccgttctgtgattgttgctctaataaggtacggacaagtcttcctaaaataacttctaattgtgcatggtctactggttttaataaataatcaagaacatgatgttgaatgccggctttcatatattcaaagtcatcgtaactcgataatatgatgacattacaatctagatgcgcaatatcattgagtaaatcgacgccatttttacgtggcatacgaatatcagtaattactaattctggctgatgttgttgaattagtgataatgcttcaacaccatctttagcagtgtatattgtattgaaatgatagtctccccaaggaatgatttgctttaatccttctcgaataattcgttcatcatcacaaataactaccttaaacatctacattcccccttgaaagtggtattttataacaaattaacgtaccttgattacgctttgaaaaaatatggagtcgtgcatgtgaaccatattgaatcattgctttattgtgtaaatgatttaatcccaaatgcttagtatcaaatacatcattattaagagattggcgtacatattgcaggcgagatgacgacatcccgataccattgtcgcaaactaaaacatgtaaattctgacgtgccaatgtcaggcgtatagtaatgtccaatgactcagtatctctaccatgtttaatagcattttctatgagtggctgaagcatcattttaccaattgtctggtgacgcgcttcttcagaactttcaatatggagcttaatcatgtcatcaaaacggatgttttgtattgcaacatactgttcaatgtagttcaactcttcgtttaattccactgtatgtgagtttgtacgtaatgagtaacgtaacatttgcgataattgttggaccacagtttgtgctaatttcggagataacgtaattaaatattgtattgtttgcatcgtattgaataggaaatgaggctggaattggcgttctatttcctttaactgaatatcacgcaagcgacgttctgtatgctcgatagaatggatcagttgctcatttgattcaaataaatcgtaaatataattattaatttcttctagttcactgttgttttttaaaggcgtatatgtacctagatgacgatttttggcatagtaaattttttgaataatcgtttcgatatcttttgtttgtcgtttagccatattatctgcgctaatgaaaccaaatattactagtaaaacaagaactacggccataacaattaacaacgtgataccatcttcaatgttttcatgtatatctttataaataatgagacgatggtcagcatggtttaattttacagattcattcataaatccgaattgttgtggtctatacttttcacctatagtaaaacggtcatcgttggcgtataaaatattgtcatattgatcaacgataagtgcgaattgtcggttatctttcttaatttcacttaaacgtggggtgttagccatataaattttaagcatatatgtactatttttgaatttaagctgatgcgttgaaaataaatacatatttttagtgtttaaatgttcataattattggttataaactgatttggtccagataattcataataaagtgttgcgggctgttggtgtattaattttaataattcacgttttgtagcggtcacatcatgatgatttgttaaatcgagctcttgaaacgaattattatgctgtgtaataaatgtctgaatctgcttttcagtatgatgtaaagatgactgactttcatcaacatgttgatgaatcgtacgatgctcaatccaaatatagatggcatagaagcttactagtccaataataatgactaaaaatactggaaaaatagtagacgcaaataacgatcgtcttaattgatgtctataaggtttgtatgccgtcattgaatcatctccaaaaatttatgatgtggaatatccggtaatttagatttcggtattaaaggtatgttcttaagattttcgatagactgatcgctttgttcactaacatcctttcgaattgacttggcatcgaactctgcaactaatcgttgttgtactgagcggcttgttaaatattgcactaactttttacgcttaggatgagggtgtgcatttttaactaaagcaataccatcaacatttaacattgttccttcaattggataaacgattgatacaggataacctttgtttttccatgtgcgtgcatcttgttcgtagcttagacctgcgtaatatttaccttttgcaacatcttcaatgactttagacgtctttgacagttgcatcgcatggttttggaattgatgcacatcacttactcgatgatgcatgctataaatagcacgcatatgttgatagcctgtcgttgttgtatttggatttgagtacgcaattttacctttaagtataggttgtaataaatcttgataacctcgaatcttaatatctccttgtaaatctgaattcactactataactgttggcattaatagaaaactagtaacatatttattgttcgagcgataatcctctaattgctgtgttacagatgtatcttgatagggaacaaaatcttctggatgatcaattgtttctgacaacacaccacccataaagacatcaccacgctccgaaaaatcttcgttatgcaagtttgaaagcagtacttgagtagatccgtgtttaatttcaattttgacatgctcttgtttttcaaattcatttaaaattggacgaatcaagtttgattgatacggagaataaactgttaatacatttttatcggattcagagtgacgcgtattagcgcatgctgataaaaaaatgagaaataatagcaagatataaatttttgatttcatgatatcccatcaattctatgtatattttaatacaataattttagcaataaatgacgcataagtaatgttaaatatttagaaatgtttatagatgacttgttaagacgttgcaaatgttgtgatagcacaaaatttttgtttgtcaagacgatttaccgaggctgtaaaatcaaactgttatattttatttgtagctgttatataaaaatcggcaagatattgaacggttcaaaagtgaatttttacgtcaataaaagtatttaatccagtctcttcatatataaaagtaaatctttctaagtgttgatttaacgcttatcaacaatcattttttataaacaaatatatactcctaaattaacttttaaagcaatgaaaatagtgaacattataactgttgtgtaacagaatgcaattagcatattactgttacacaaattagtacagtttctatgttttgacatacatttgatgaaaattgtacataatttatgtgaaaaaaatcacaacaaacatgctacaatgactatgaaaacgttaacatagcatttcaaattcacaacattatacagatggaggcgtttagtatgttagaaacaaataaaaatcatgcaacagcttggcaaggatttaaaaatggaagatggaacagacacgtagatgtaagagagtttatccaattaaactacactctttatgaaggtaatgattcatttttagcaggaccaacagaagcaacttctaaactttgggaacaagtaatgcagttatcgaaagaagaacgtgaacgtggcggcatgtgggatatggacacgaaagtagcttcaacaatcacatctcatgatgctggttatttagacaaagatttagaaacaattgtaggtgtacaaactgaaaagccattcaaacgttcaatgcaaccattcggtggtattcgtatggcgaaagcagcttgtgaagcttacggttacgaattagacgaagaaactgaaaaaatctttacagattatcgtaaaacacataaccaaggtgtattcgatgcatattctagagaaatgttgaactgccgtaaagcaggtgtaatcactggtttacctgatgcatacggacgtggacgtattatcggtgactatcgtcgtgtagctttatatggtgtagatttcttaatggaagaaaaaatgcacgacttcaacacgatgtctacagaaatgtcagaagatgtaattcgtttacgtgaagaattatcagaacaatatcgtgcattaaaagaattaaaagaacttggacaaaaatatggtttcgatttaagccgtccagcagaaaacttcaaagaagcagttcaatggttatacttagcataccttgctgcaattaaagaacaaaacggtgcagcaatgagtttaggtcgtacatcaacattcttagatatctatgctgaacgtgaccttaaagcaggcgttattactgaaagcgaagttcaagaaattattgaccacttcatcatgaaattacgtattgttaaatttgctcgtacacctgattacaatgaattattctctggagacccaacttgggtaactgaatctatcggtggtgtaggtattgacggacgtccacttgttacgaaaaactcattccgtttcttacactcattagataacttaggtccagctccagaaccaaacttaacagtattatggtcagtacgtttacctgacaacttcaaaacatactgtgcaaaaatgagtattaaaacaagttctatccaatatgaaaatgatgacattatgcgtgaaagctatggcgatgactatggtatcgcatgttgtgtatcagcgatgacaattggtaaacaaatgcaattcttcggtgcacgtgcgaacttagctaaaacattactttacgctatcaatggtggtaaagatgaaaaatctggtgcacaagttggtccaaacttcgaaggtattaacagcgaagtattagaatatgacgaagtattcaagaaatttgatcaaatgatggattggctagcaggtgtttacattaactcattaaatgttattcactacatgcacgataaatacagctatgaacgtattgaaatggcattacatgatacagaaattgtacgtacaatggcaacaggtatcgctggtttatcagtagcagctgactcattatctgcaattaaatatgcacaagttaaaccaattcgtaacgaagaaggtcttgtagtagactttgaaatcgaaggcgacttccctaaatacggtaacaatgacgaccgtgtagatgatattgcagttgatttagtagaacgcttcatgactaaattacgtagtcataaaacatatcgtgattcagaacatacaatgagtgtattaacaattacttcaaacgttgtatacggtaagaaaactggtaacacaccagacggacgtaaagctggcgaaccatttgctccaggtgcaaacccaatgcatggccgtgaccaaaaaggtgcattatcttcattaagttctgtagctaagatcccttacgattgctgtaaagatggtatttcaaatacattcagtatcgtaccaaaatcattaggtaaagaaccagaagatcaaaaccgtaacttaactagtatgttagatggttacgcaatgcaatgtggtcaccacttaaatattaacgtatttaaccgtgaaacattaatagatgcaatggaacatccagaagaatatccacagttaacaatccgtgtatctggttacgctgttaacttcattaaattaacacgtgaacaacaattagatgtaatttctcgtacattccatgaaagtatgtaacaaaatttaaggtgggagcactatgcttaagggacacttacattctgtcgaaagtttaggtactgtcgatggaccgggattaagatatatattatttacacaaggatgcttacttagatgcttgtattgccacaatccagatacttggaaaattagtgagccatcaagagaagtcacagttgatgaaatggtgaatgaaatattaccatacaaaccatactttgatgcatcgggtggcggtgtaacagtcagtggtggcgaaccattgttacaaatgccattcttagaaaaattatttgcagaattaaaagaaaatggtgtgcacacttgcttagacacatcggctggatgtgctaatgatacaaaagcatttcaaaggcattttgaagaattacaaaaacatacagacttgatattattagatataaaacatattgataatgacaaacatattagattgacaggaaagcctaatacacacatccttaacttcgcgcgcaaactgtcagatatgaaacaacctgtatggattcgacatgtccttgtgcctggttattctgatgataaagacgatttaattaaactaggggaatttattaattctcttgataacgtcgaaaagtttgaaattctgccatatcatcagttaggtgttcataagtggaaaacattgggcattgcatatgaattagaagatgtcgaagcgcccgatgatgaagctgttaaagcagcctaccgttatgttaacttcaaagggaaaattcccgttgaattataaatacaattcagaccgaaaagaaagcatatgcaacttcaagagtgaaggggcatatgcttctttttcaattgagtattgagtattagcaagacgtagtaagtatatgagacaacttctacaatggttgaaggaagacgtttttgtaagtagctatgctgataaagaatgtgatgtcttgttaaaggtggggttccaatatcatcatttagctgatgttgaatgggttattatttgctacttgcatatgaatatgagtcttttcaaatttttattgaccctgagtaatgaaaaatattaagatgaaacttaatattaaagcaatgcggagcgtgattatgaagagaattagtaaagatatatgggcagtatttaaattactgtatcaaaataaagggcgttttagcattaatgccttactattgcagttaatcatgatttttattagtagtacatacttaattttactatttaatatgatgttaaaagtagctgggcaaagccaacttacgattaacaattggacggaaatcgttagtcatcccgccagtgtgatacttcttattatattcatattaagtgttgcctttctgatttatgtagagttttcattgttagtttatatggtttatgccggctttgatcgacagattattacatttaaatccatttttaaaaatgcctttgtaaatgtgcgtaaactcataggtgtaccagttattttctttgtcatttatttaatgttaatgatacccattgccaacctaggactaagttcagtattaacaaaaaatatttacatacctaaatttttaacggaagaacttatgaaaacgacgaaaggtataatcatttacggtacctttatgattgctgtatttatattaaattttaaattaatatttactctaccgttaacgattttaaaccgccagtcgttatttaaaaatatgagactaagttggcaaattacgaagcgaaataagtttcggcttgttatagaaatagttatattagaactcatcattggtgcgattttaacattaattatttcaggagcaacatatcttgctatttgtgtagatgaagaaggagataagtttttagtctcatcaattttatttgttgtattgaaaagcgcattgttcttctattatttatttacgaaattatcattaatcagtgtgttagtactgcacttaaaacaagagaatgtattagaccaaccgggcttagaatttaaatatccaaaaccgaaacggaagtctaggttctttataatttcaatggtgcttgcagtgacatgttttatcggttataacatgtacttactttacaataatactatcaatacaaatatctccattattggccatcgtggtttcgaagataaaggtgttgaaaattctattccgtcattgaaagctgctgcaaaagcgaatgtcgaatacgttgagttagatacaattatgacgaaagataaacaatttgttgttagtcatgataacaatttgaaacgtttaacaggtgttaataaaaatatttctgaatctaatttcaaagatatcgtcggtttgaaaatgcgtcaaaatggacatgaagcaaaatttgtatccttagacgaatttattgaaacggctaaacaatcaaatgtgaagctactagtagagttaaagccacatggtaaagaaccagcagattatacacaacgtgttattgatattttgaaaaagcatggtgttgaacatcaatatcgtgtgatgtctttggattatgatgtgatgactaagttgaaaaaagaagcgccatatctcaagtgtggttatatcattccgttgcagtttggtcattttaaagaaacatcattagatttctttgtcatcgaagatttttcttattcgccaagacttgttaatcaagcgcacttggaaaataaagaagtctatacttggactattaacggcgaagaagatttaacgaaatacttacaaaccaatgttgatggtattatcacagatgacccagcattagctgatcagattaaagaagaaaagaaagacgaaacatacttcgatcgttctataagaattttgtttgaataatataaacaaagacctctaaagttatcaagatgataccttcagaggtctttttaatgttgccatctatgggataggcaatcgtttcattcgtttatattcatatgacaagtatttgtatggcaatttggcgtcacaaacacttacatgatttattggtgaattattaattgttttgtgaatgcaaagggttagaaattgaattgtaaatactttctaatctttgtttcgctttagtcatttgatccaaatttttagtgcgtatagcggattttgcaatatagtgcgcagctaaaatatcgcgtttttgaaacgcatctaaatttaggtacgataatttatttaagtcagtgtttgctattaattcatgtaattgatctacaagcgcttgatgttgatacgtatgtgatgtagtttcagatttgcttgctaatttaataccagtcgtatcaaggagcgccgctttaataccagcaactaaatatgttttgattttcatttgtgttgtcatgctttgttactcctttgatgtacattaatcaaaaaaattatacactattgtatattgcaaagctaattaactataacaaaaagatagttaatgctttgtttattctagttaatatatagttaatgtcttttaatattttgtttctttaatgtagattgggcaattacattttggaggaattaaaaaattatgaaaaagcaaataatttcgctaggcgcattagcagttgcatctagcttatttacatgggataacaaagcagatgcgatagtaacaaaggattatagtgggaaatcacaagttaatgctgggagtaaaaatgggacattaatagatagcagatatttaaattcagctctatattatttggaagactatataatttatgctataggattaactaataaatatgaatatggagataatatttataaagaagctaaagataggttgttggaaaaggtattaagggaagatcaatatcttttggagagaaagaaatctcaatatgaagattataaacaatggtatgcaaattataaaaaagaaaatcctcgtacagatttaaaaatggctaattttcataaatataatttagaagaactttcgatgaaagaatacaatgaactacaggatgcattaaagagagcactggatgattttcacagagaagttaaagatattaaggataagaattcagacttgaaaacttttaatgcagcagaagaagataaagcaactaaggaagtatacgatctcgtatctgaaattgatacattagttgtatcatattatggtgataaggattatggggagcacgcgaaagagttacgagcaaaactggacttaatccttggagatacagacaatccacataaaattacaaatgaacgtattaaaaaagaaatgattgatgacttaaattcaattattgatgatttctttatggaaactaaacaaaatagaccgaaatctataacgaaatataatcctacaacacataactataaaacaaatagtgataataaacctaattttgataaattagttgaagaaacgaaaaaagcagttaaagaagcagatgattcttggaaaaagaaaactgtcaaaaaatacggagaaactgaaacaaaatcgccagtagtaaaagaagagaagaaagttgaagaacctcaagcacctaaagttgataaccaacaagaggttaaaactacggctggtaaagctgaagaaacaacacaaccagttgcacaaccattagttaaaattccacagggcacaattacaggtgaaattgtaaaaggtccggaatatccaacgatggaaaataaaacggtacaaggtgaaatcgttcaaggtcccgattttctaacaatggaacaaagcggcccatcattaagcaataattatacaaacccaccgttaacgaaccctattttagaaggtcttgaaggtagctcatctaaacttgaaataaaaccacaaggtactgaatcaacgttaaaaggtactcaaggagaatcaagtgatattgaagttaaacctcaagcaactgaaacaacagaagcttctcaatatggtccgagaccgcaatttaacaaaacacctaaatatgttaaatatagagatgctggtacaggtatccgtgaatacaacgatggaacatttggatatgaagcgagaccaagattcaataagccatcagaaacaaatgcatataacgtaacaacacatgcaaatggtcaagtatcatacggagctcgtccgacatacaagaagccaagcgaaacgaatgcatacaatgtaacaacacatggaaacggccaagtatcatacggagctcgtccgacacaaaacaagccaagcaaaacaaacgcatataacgtaacaacacatggaaacggccaagtatcatatggcgctcgcccaacacaaaacaagccaagcaaaacaaatgcatacaacgtaacaacacatgcaaacggtcaagtgtcatacggagctcgcccgacatacaagaagccaagtaaaacaaatgcatacaatgtaacaacacatgcagatggtactgcgacatatgggcctagagtaacaaaataagtttgtaactctatccaaagacatacagtcaatacaaaacattacgtatctttacaacagtaatcatgcattctatgatgcttctaactgaattaaagcatcgaacaatcggaagcatatttctaaattatttattcattatagtcttaaacataacatgacctaatatattactaacctattaaaataaaccacgcacatctaagtgatatacgacaatcacagcaataataattgctttagaaagtcgtgccgaactggaacttacaagtctagttcgaacacacactgatgtgagtggttttctttattttaaacatgaacaatcagataagttactagcattagcaaatattattaaatcaaagggcttcgattcataaaatttaaaacaatgattaaaattagacgtgtaaatgttaaattctaaaacggaaataaccaccatcccattaaaccactttttttgttcaatcactatatttcacacagcttcattaataaaacgaaattgcttcaacccgcttcaacttcaactggcttcaacttcagcctacttcattcaataacaaaacgaatccgcttcatccaaaatcaaccattctaacgcacatattcaaatatagcagctgcacccatgccgacaccaatacacatcgtaaccatgccgtaacggctatcgggacgtctacccatttcattaagtaaacgcgcggttaacattgcgcctgtagcacctaatggatgacctaaagcaatagcgccaccattcacattcgtacgtgatatatctagacctacttctttaatagatgcaatcgtttgagaagcaaatgcttcgttcaattcgatcaaatcaatgtcttcaacagatagattgctgagtgacaatacttcaggaatcgcatatgcaggcccaatacccataattttcgggtcaacgcctactgccttaaaaccaacgaatcgtgcaataggtgtcacgccgagttctttcactttatctccagacattaaaactacaaatcctgcaccatcagaaagtggggcagatgttcctgcagtcatagtgccgtcagctttaaatactgtacgtaatttggctaatgcctccatcgtggtgtcagggcgtataaattcatcttggtcaaagatatttgtgtgtacttttggtcctgcgtttgtatattcaactgagtttacttgtattggaataatttcatctttgaaccgaccatcacgttgtgcgtcataggcacgttgatgacttctgacagcataagcatcttgatcttcgcgtgatacgtcaaattgggatgctacattttcagcagttaaacccataggatatgacgcacctatatcatcatattgtaaggttggattgtttgtgggctcgttgccacccattggtacggcactcatcaattcaacgccaccagctacaagtatatctccttgaccagccataatttgattggctgcaatcgcgatggtttgtaatcctgatgagcagtagcgattcactgtttgacccggtaccgtgtcagataatcccgcacgcaatgcaatcgttcgtgcaatgttttggccttgtaatccttctggaaaagccgtaccaacaatgacatcttcaatcatattcttattgaattttccgtcaatacgtttcaatacgccttgtaatactttggctgcgacatcatcaggtctttcgtggaataatgcgccttgctttgctttcgctgcggctgaacgcccataagctacaatgtatgcttcttgcatggttatcatcctctcttaatgactatcttttaattacgtaatggcttaccagtttttaacatatgtgcaattctttcatatgattttttagattttagtaagtcaataaagccaattttctccaacgattgaatgtaacgttgattgataaatgtatttcttggtaaatcaccacccgctaaaattgtggcgatatttaaggcaatatgataatcatggtcgctaataaaatgaccccgtctttgcgcatctaattgtccttggatcaatgctttgaagtcttcacctaaagcgatatattgatgtctaggattcggaatatagtttgtttctgcttcatatttcgcacgtttgagcgcaacttcgacacgttgtgctgtattgaaaataatcgtatctgtatcacgtaaataaccataacgacgtgcctcaaaggcatttgtagagactttcgcaaatgcgatattcgtcagtacttttgtcatggaagcttgtttgtcatcaaacttatgcgatgtgcgtaatatgcgatcagccatttctgcaaggccaccgccactcggtaataagccaacacctgcttcaacaagaccgatatatgtttcacttgcagcgacaacaataggtgagtaaagtacaagctcacagccaccgcctaaggcacgaccttgaacagctgtgactactggtttcaaactatacttcaaacgattaaagctataatgtaatttatcaattgattgtgcaacgacatcatctacaagaccgtcttcatgcgcctttttcattaagaaaaggttagcacccacactgaaattgttaccatctgcataaataaccatacttgtgtaatggtcattttccagtaaatcaatcgcatcaactaacgcatcgttgaattcatcggtaatgacattatttttactttgtaatttcagtaacagttgatcatcatgagttacggaaagtttggcatcacctttatcccaaagttcatcttttacgaagtgagaaataggtgttgcatattcaatggtctcatcttgtttataaaagccaccatctaaatcactaatccattgtggtaagtctccaagttcgtcttccatacgtgttttaacacgttcgtatcccattgcatcccataattggaatggaccaagtttccagttgaacccccagacaagcgcacggtctatgtctcggaaatcatcggtagctttaggtacattgatagcagagtaatagaaattattacgtaatgtctcccataaaaatagtcccgcttcgtcttgcgcattgaatatggtatcaaggttatgcactaagtctttattaaattcatttaaaattggtaattgtggttgcgatacaggtacataatcttgtttttcaacatcgtaaacaagtcgagctttagtttctttatcctttttgtaaaatccttgtttcgttttacgtccgagtgcgccattgtcaaacaacgtatttacaattttgacatcatgaaaataaggtgtttcttcaggtacttgttgcatgcctttaattacagacactgcaatatctaaaccgactaggtcagatagcgcatatgtacctgttttaggacgaccaatcgcttgcccagttaaagcatccacatctacaatgcttatcttgtgttgctcggcgcgatacataatatcattcattgtttgcgtgccgactctatttgcgacaaagccaggcacatcattgacgacaatgacacctttacctaacacattttgcgcgaaattttttacatctaatataatagattccttcgtgtgtgacgtaggtattaactccactaatttcataatacgtggtgggttaaagaaatgtagaccaaagaatcgttcttgatccttctcgttaaatgcttgagcaatcgcattaattggaatacctgatgtatttgtagcgaataaagcatcttctttagcatgttgtagaacttgttgccaaacagcatgcttaatttcaatatcttctttgactgcttcgatatataaatcagcatcatcatttaccaagtcatcatcaaaattaccatatgttaaatgactcgctagatttaagtcgaatagtagcggccgtttcttatctgtaattttatcgtaagattttttcgcaatgagatttggatcgtttttgtccactacaatatctaatagttttactttaagtccagcattcacaaaaagtgctgccagttgagcgcccattgtgcctgcgccaagaacggttactttattaattgtcatagtgattcctccaatttagttgaggataagataaccattaagataattggaataacgttgctattttataaaattaattaagtatctttgacagtcatcttagcctcttatttaaggaaaaagctttatgcttaaaataagtcttttttagtgaaattaatgcatctcatataattatttgctatttatacgaaagcagaatctccagtcaaagcgcgtccaattactaaggcattaatttcatgtgtaccttcgtacgtgtaaatcgcttctgcatcagagaagaaacgtgcaatatcataatcgtcagctagtatgccattaccacctgtaataccgcggcccatagctactgtctcacgcaaacgtaaggcattcatcatcttcgccgttgaagttgcaacctcgtcatattcaccatgtgcttgcatattagctaattgagcacatgttgccattgcttgagctaaattaccttgcatcattgctagcttttcttgtattaactgatatttactaattggtttgccgaattgcttacgctcagtgacataatctaatgtggcacgtaaagcgccagccataccacctgtagccatataagcaacgcctgctctcgttgaataaagaattttggcaatatctttaaagcttgttatgttttgtaagcgatccgcttcatctactttgacattagttaatttaattagggcgttaggaacaatgcgaagtgcgattttattatcaatgacttcaatatcgacgccatcttgttctggtctgactacaaagcaatggggtttgccagtttctttatttactgcgaatactggaatgacatcagatacatgtgcaccaccaatccatttcttttcaccattgataacccaagtatcgccttggcgttcagcgactgtttcaagacctcccgcaacgtccgaaccgtgttctggttcagttaaagcaaagcatgtacgcagttcatgtgactgtaatttaggtacatatttcgcaatttgttctttgctacctccgaaatagaaagtgttatgccctaaaccttggtgaacaccgagtagggtagctaaggaaatatcaaatcgcgcgagtaggtaagacatgaaaaactgaaatagttgactaggcattttggcgtttggacgatccttgtaaagtaatggattgttaaaataatttaattctcccagatctttaaaatagtcctcgggtacagtagcgtctatccaatgttgattaatattttcacggtacttactttctagcaatgaatctacttgttgtaaaaattcgacttcaccgtctgttaaacctttagcaatactaagtacatcttcaggaaataatgtttttaagaccgtttctttttcaaatgtcatataaattcctcctaaaaataatatgaatactaatgtgaaatgcatttaattcaaaaacaacacgctttatttgtaaacgcttacactaaatgtcaaaaatttttatcacctttaaagtgtttgcgagactttgtcattcatcatttgtcgaatcgcaagtttatctggtttctgcgtactgtttaacggcatatgtgtcactggtacatacattcttgggactttataacctgctaaacgacttcgcatatgttgatttaaaatttcagcgtaatgaggttcatcttcgcgaagtataatggctgcagcaattgattcaccatattttggatgatcatagccaacgaccacacaccggtctactagtggatgctcagctaaagcattttcgacttcggatggtaagacattttcgccaccagttatgattaattcttttttgcggtcaataataaatatatcgccatcgttgtccatcttcgctaagtcaccagttaataaatatcgaccatgaaatgctttggcagtctctgctggtttattccaatatcctggcgtgacatttttagccttaattgcaagttcgccaatctcaccagtaggtacttcctcaccgttatcatcaaggatacgtgcatcaacgaacatgactgctttaccaatactcattggcttacgttttgaattttccggtgtattaacaagtacaagaggtgcttcagttaaaccatagccgttaataatgtttatgccatattgtttaaaagctgcttggatacttggtaatggttgtgaaccaccttggatgatataatccatagctctaaaattttcaggattaaaattactagcacgtagcgtactataatacattgtcggaatcatgataataaatgtagggtgatattgtgcaatcatgtcattcaattcttcgccgttaaagtaacgttgaagaataagtgtgccacctgacattaatactggtaatacagtatcgttaaaccctaaaacatggaacattggtgttgatacaatcgtaatatagtttgaattgaacttatacgtcagctctaagtttgcaccgttatgaacaaatgattcatatgagaacatcacacctttaggtgatccggttgtaccacttgtataaattaatgctgcaagatcttgtggttcaacaggtgttgcttgaaaaggttggtgataatctggatttacgatttcatcatattgcgccacatcaatatccatatgcaataagttttggtcaatatcggtgagtgaacttaaatgtttttcagcatagaagagcagttttaattgtgcatcttccacaatggctgcaatttcttttgggttaagccgccaattcaatggtaaaaaaaccgcacctgttttaaaacaagcaaacaataaatctaatattgcaatatcatttggcgcaaaaataccgataacatcgccttttttaacaccttgagatgttaaataatgtgccatattatcagcgcgtgcattgagttgttggtatgtccaagatgtttgttttgcgtgatcaataacggcaggcttgtcatcatcgaagtctgaacgcgtttttatccaatcgaaattcattagtataccccctttagcttcactttcatactttatgaattgattgtttaagttgtccccatttttctttgtaaatgctggtatcaattaattttaaatgatcagcaataattggtttaaaagccatttgattcaaaatatctttatgcaaatcaagacctggtgcaatttcaattagtttcaagccttgattggtgagttcgaatactgcacgatcagtaacaaaatagatttcttgctcgagtgattgtgaatattgtgcattaaagtcgatatggctcacatctgatacaaatttctggttttgtccttcagtttcaatgtttaatcgttgattatggcatgagacatgactgccagctacaaaagtacctgaaaagataattttatttacagattgcgtaatgtctataaagccaccacatccatttagtcggtcattgaagtaagacacgttgacattgccgtattgatcaacctcagcaaagctaagataggcaactgatacaccattgttataaataaaatcccatgctcgatcatgaggcatgcgcacatctgcattgtaattcataccaaaatgttcacgactcccaacgaatccaccgaaaatgccaacatctaaaatcggttgcacatcatgttcaacacattcttcatgcaataaattagagagttcattattgatgccataaccgatgctaattgtatcgccataagttaaaaactgagcagcacgtcggagaatcaatttgcgactattaaaaggtaatgcgggttcaggtattccatcaattcgttcttctccagacaaggctggtaaataatgactttgaattacttggcggtgattcttttcatcttctgtgacgtatacataatcgacaagatttcctgggataacaacttcattcggttttagttgatagtcgtcaactaaagctttaacttgtacaataactttcccatgattggctttcgcgtttaatgcgacatgataacactcgctcaagtacgcttcttgagttaaataaatgttaccttgttgatctgcgtatgttcctctcagtagtgccacatcaacgctagggaatgtgtaatgtaagtatgtttcatcgttgatggttactaatgaaactaaatcatccgttgttcgtgtatttactttaccgccaccgtatctaggatcaacagctgtgtttaatccgattttagtaataactccaggtaataattgattactctgacgataatgagttgcaatgataccttgtggtaaaaaataagcttcaatgtcattatttttcattgcttgtgccgttttggaagaagccgttaaaatactcataatgacacgtttaatcatgcgacgttctataaaatcatctaaatccggtgcggcacctaaactatgaatatcattcgctaatataaacgttaaatcattgggcgtatgatatgtgtcatgttgcgctaacacagcacgtagaacttcggcgggtaagttggctacagctaatgctggtaaaccaatcacatcaccatctttaatgatatgttgtaagtcgtgccatgtgatttgtttcaagcaagtcacctccatcacatttgataaaatatagcgtttttacactttgtgtaaacccttacaagaaatataacataacgacgtttaaaatcaattagaaatatctttttattctgataatagacacagtatagacacattttgatggtcgataacaattgtaatatcaagggtttgtaatgaattgaatatcattaaaatacttatataaaaatattgttcggaatataaaaagttaaataggttttgatttttaaatatgaaatacaaagtgcccaatcgaacaaagtatttatattaaaatatggaaaatccatcaatattaaattaaaatagttttattatgaaaagtgaaagtaggtaagtctatggaaggtcttaatcatcgaagaaatacagaaaaagaagagacaacacaaacgcaatcagttgcacctaatacaggtgaagaggggatgtcatcagcaagtacacaatcaactaagacgtccgacatacataatgaatctatcgataaacaaatggaagctaaagcgcatgaaacagcgcaaaatacagatttaaaaaacgaagcaagaagtttatttgataatgcaaccaaatcaatcggtagactagcgggcaatgatgaaagcttaaatcttaatttaaaagatatgctttctgaagtatttaagccgcatactaaaaacgaagcagatgaaatatttatagcgggtactgctaaaactacgccagcaatttgtgacatatcagaagaatgggggaagccatggctcttttctcgagtattcatcgctttcacagtaacatttattggattatgggtcatggcagcaatttttaataacactaacgcgattccgggtctcatttttataggggctttaacagtaccattatcgggtttgttcttcttttatgaatcaaatgcgtttaaaaatattagcatttttgaagttattatcatgttctttattggcggcgtattttcattactaagtacgatggtattatatagatttgtcgtttttagtgatcaattcgaaaggtttggttctttaacatttttcgatgcatttttagtaggattagttgaagaaactggaaaagcactcattattgtttatttcgtcaataaattgaaaacaaataagattttgaatggattattaatcggtgctgctattggtgcagggttcgcagtttttgaatcagcaggttatattttgaatttcgctttaggagaaaatgtcccattattagatattgtcttcacacgtgcgtggactgcgattggtggtcatttagtttggtcagcgattgttggtgctgcaatagttattgcgaaagaacagcatggctttgaattcaaagatatttttgataaacgctttttaatattctttttatcagccgttgttttacatggcatttgggatacatctttaactgtacttggcagtgatacgttgaaaatatttattttaatcgttattgtgtggatacttgtattcattttaatgggggcaggtttaaaacaagtgaatttactgcagaaagaatttaaagaacaacagaaaaaagtagacgaataataattaaagcttatgttgctcatatgtttgtgacataagctatttttataatttgtctttaaaagagtggaataggaatactttttggagttaaaaaagtgtttcacgttaaacaaatagtgacaattagatttatataaaatgaacatgattcactgaaagtatgtaataatcattttattgaaattcatcaaacagaaattaatacaatcatataagcaaattaaaccacgccataatcatattggatgacttcggcgtggtttttatagttgaagcagggctgagacataaatcaatgtcccacactcccttatcgttcaatcgttgttcgataatcgattaaatagataccttcaggtgttactttataatttttaaccttagagttagcagcgactatttgatcgttgtaagcaatataactgtttggtacatctcgacttgataatttaataatatcattagaaatattgtgacgttccttaacatctacagtatgattcaattgattaattaaatcatcgacgttgctattattgtagtctcctttattaatagcaccatcttttttatatgcttgattaaagaaataacctgtatctccacgaggaattgttccgaaactatacatcgttgcatcccatgcagaacggtcttttaagtaaccttctatgtcatcaacacttttaatgtcgatttcaatatttgcttttttagcatctgattgtaatacttgcgcaattttcgatagctctggacgaccgtcatacgtaattaacttaatttttaaagggtgttcttttgtataaccatctttagctaataacatttttgcttgttcgatattttgtttggttaacttaggttctttaatatatggaattttatcattaaatggactcgttgcaggtttcgcataaccttgataaatatgatctgcaataccttgtctatcaatgatatgatctaatgcttcacgaacggatttagtcatttttttattagtatgattatacataagtaaagaagttctaaatccagattcttttgacacttttaaattttgattattttctatgtcttgaactttattaactgggacatcagttattaaatcatctttttgagattctaaatttctgacgcgattattgccgtcttcttggtacgtcacagtaatatgatcaagtttcggtttaccttgccaatagtccttaaaattcgacaatgatatttttcgagattgcttataatcttttatttggtaagggcctgtaccaacaggagtttgattaacatctgatttagcatctgtatcataaattgccataaaaggattagctaattcagatacaagttcagggtaagcggagttggttttaattgtcagtttttgacctttagcggtaattgatgatattggtaatgaatatttgaccaagtcgctttttttcatgctattttcaaggctagatttcactttttctgcagtcaatttttgaccgttttgaaatttaatattatcttttaattctatatctaacgttgtatcatttggttgatgatacgatttcactaatgctttttctatttttccttgatcatttgttttaaataatgattctgcagcaccaatcttaactggtacatctgtttcataaggtgcaatagactttgtttttaacggtaacgaaatatttaagtctttgccagatgaatgcattgagccacatcctgataacactaatactgctgaaaatatagttgctagtcttttaaacttcatttcattaacactctctttctaattactatgtaaaacccaacaattaatattttaaaactttattttgttaaagtaaaatgttgttcaagtttagtaattattaaagttcaattaattgtagtaattatgctttttaaaaataaatattagaaatgaagttagcgacatttatagtgattcacgataaacatatataactaagtattgagcaactgctgtagtactacagcttggttatgtttagtatcttttgctgcatataacaatagaacatgattatgctgatttacaatatcctttaatttttcaaaagcatctttttgcgcatcctgatcacgtaattctttttcatatttttctttaaaagctccaaaaagtttaggatcatgttggaaccattgtcgcaactcagtagaaggggcaatgtcttttaaccaataatctaggttagcagttcttttcgaaatacctctcggccagactctatcgactaggatacgaatagcgtcggtattatctttattgtcataaatccgtccaatatctacggtcatcttgtgaactcctttcttatgaaattcagtgagcatacatcaatgcatgttgtggtgggacgaccaaataaattttgcgaaaatatcatctctgtcctactcccaattaaaaaacagccatgacaaagtaaagtcatagctgttttggtatagatgtcatttatttttacgtttagttaaatacttcaaaccaactgcaaagaccgtgtacccggctatggtttgtatcaatgttttaattaaattattatttttaacaataatatttgcagtaacaatacttacgaaatataatgcaaatacttttacgtaacgttgattaagtttcatatgagcactaaacctcttttctcagttatactgcaacgcttagtcttggaataaatgtttcgtagtgtacgcgatccatatcgtaatttaaagatttaagtgcttcgatcatagattgtaagaattttgtaccaccacagatataaatttcaggtttatttgctaaaaatacttgtaattcttcagcaccaatatagccttgtttatcttttaagtgtgtatataatttagcgttgtcatgatggcttgcgatactgttgaagttgtctttgaaaggtaaatgttgttcattttcagcaacttgaaccatctgtgtatctaaacctttggcagaggcagcttcatacatagctactaaaggtgtaacaccaatacctgaacctaagaaaagttgtggttcagtcgtattctctaatacgaatccacctacaggcgcagctaaattaatcatatcgccttctttaatctcatcgtgtaaaattgttgaaacttcgccttcatgttctgttgtgacatcacgtttaacgccaaaagttaaatggtttttttcacctgatacgatagaatagtgacgtttagctctatatggaagtttatcactagaaacatcaactgtgatgtattggcctggtgtaaattcactaaagtcatattcttcagtttcaactgtaaatgatttaatgtcttcagattcttgtttaatattggtaattttgaatggtttaaaaccaatccacatcatttgatcataaatttctttttcaatttggatgaacacatccgcaataacgccatatgcttttgcccaagcttgaatgacagggtcattttcttctaatcctgtcacgtcttgaatggcttttaataaatttttccccacaattggataatgttcagcataaacttgtagtgcgcagtgtttatatgcgactggcataatgactggtttaataacacttaagttatcgatattaaccgctgcggccattacagcttgtgctaatgctgaagattgcatgcctcgtttttggttcgtttgattaaacatgtttaaaagttcaggatgcgctttaaacatttttggataaaagattgacgtaatttctgtccctttctctttaagtaaaggcaccgtttgtttgataatgtctttctcttgttctgtaagcatgatactcctcctttaatctgtatattttgattattctactaaaaatttcgatattcaattaattggtttgagaaaatataaataaaatggcaaatttgataattgtatgacatttttaattttttaaatacttatcaataagcattgtgtacaattgtctgtttgcacaccgacgattgagcgcatttatttgactaattcaaaaaacattgttgttttcctagaaaaaagtaaacatgataataaaaatgtgaaagtgtaaataatcactggcgaagtacgaagactaaagacatctaagatgtaatcgtatacaaattaaaaaggtgtaaaaattaaaataaaatgtgaaataaatcacaatttaatattgacccagtacttaatgcatgttacattttatatgtgaaataaatcacaaacttaaaagcggatgacacatgaccttttaagttatgcgttgaaaataaaagagatgtttatttgcttttgtatcgtcaataagcagcattaaactaacatatttgaagctacatgtatgttagtgaattaatcataagggagtttttgtaatgaacaaatttaaagggaacaaagttgtattaataggtaatggtgcagtaggttcaagctacgcattttcattagtgaaccaaagcattgttgatgaattagtcatcattgatttagacactgaaaaagttcgaggagatgttatggatttaaaacatgccacaccatattctccaacaacagttcgtgtgaaagctggcgaatacagtgattgtcatgatgcggatctagttgtcatctgtgctggtgctgcacaaaaacctggagaaacacgtttagatttagtatctaaaaacttgaaaatattcaaatcaattgttggtgaagtaatggcatcaaaatttgatggtattttcttggtagctacaaatcctgttgatattttagcgtatgcaacatggaaattctctggtttacctaaagaacgtgttataggttctggtacaattttagactctgcacgctttagattattgttaagcgaagcgttcgatgttgcgccacgtagcgtcgatgctcaaattattggtgaacatggtgacactgaattaccagtatggtcacacgctaatattgcgggtcaacctttgaagacattacttgaacaacgtcctgagggcaaagcgcaaattgaacaaatttttgttcaaacacgtgatgtagcatatgacattattcaagctaaaggtgccacttattatggtgttgcaatgggattagctagaattactgaagcgattttcagaaatgaagatgccgtattgactgtatcagcattattagaaggcgaatatgaggaagaagatgtttatattggtgttccagcagtcatcaatagaaacggtattcgcaacgtcgtagaaatcccattaaacgacgaagaacaaagcaagttcgcacattcagctaaaacattaaaagatattatggctgaagcagaagaacttaaataactttttataaaatctataccatcccaaaaattgtaaaaccttacccaaaaaattgtataaagggctatttgatacaactatatgtgtcgagtggccctatttttaatgtagtgaaagtcgttgttgaaattaaattcaaatctggcacttaagctttaatcatagcattaagatgattgtctagcagaggcgatttgcgggctcactacagtgcatgatgaacttaatgcttcaaatgtaacattaaaaataaaagcaacgatgtcacttcttacttcgtacatcgttgccattagttctgttgatatttcggttagtcttaatccccgagcaattcttcaatttcatttttgataactgtaacgtgaggcccataaattacttgcacaccagtgccttgctggattacacctttggcaccagtactttcgagtaatactttatcgactttgtcattttgatgaagtgtgacgcgtagtctcgttgcacaacagtcaacgatttcaatgttatctttgcctcccaaaccagcaacaatagtttgtgctctttcagtagcctcaacttgttgtgctgcagctttatcttctcgaccaggtgttttgaaattaaatttcgtaattaagaatctgaaaacgatgtaatacaaacagaaccacacaattccaataggtatgacgtataggtagtttgttttactattaccttgtagcacaccaaagagtaagaaatcgataaagcctccactgaaggtttgaccaattgtaatgttgaaaatgtctgccatcataaatgctaatccatcaaagaaggcatggattacataaagaataggtgcgacaaacaagaaactaaactctaaaggttcggtaatacctgttaaaaatgaagtgagtgcagcggataacattaaaccgccgacaacttttttatgttcaggtttagctgtgtgataaattgcaagtgcggcaccacataagccgaacatcatcgtaataaaacggcctgacataaagcgtgacacacctgaataatacttcgtcacatctggatcaccaagttgagcaaagaagatgttctgcgtaccttgaactaagtgccctttgacttctaaagtaccaccaagtgccgtctgccaaaacggtaagtaaaaaatatggtgtaaaccgagtggacctaacaatcttaagatgaagccataaacaaaagtaccgatggcacctgttttcgttacaaatccaccaacatgataaatgccggcttgtatgcttggccaaatgaaaaacatcaatacacctaaaaagattgcggcaaatgctgtgacaatagggacaaatctagagccaccaaagaaacctaaatacggtggtaataccactttgtgatatttgttgtgaagtattgcggtcataatacctgtgataatcccgccaaaaacaccggtttcaaccgtttgtataccgagcaccatgccttgtccattttgtgcaagctgatcttttgccaatgtgcccgtgatagttaataagccattcatagttgcgttcataattaagaaaccgagcagcgcagctaaacctgcagtacctttatcgcttctagataatccgattgcgacaccaattgcaaagatgaccggtaaattttggaaaacaatactacctgcagctgacattaatgtaaaaatattttgtaataaggtaatatctaaaatagggtatgctttaacggtgtttggattacttaatgcaccaccgatacccaacaatagacctgcagctggtaagattgcgataggtaacataaaggacttgccgaactgctgtgctttttcaaataaagatttcatcaacatccctcctaattattctcaatatagcttttgagaaatttaatatcaatatatattctgtgtatgaaaatatttttcataaaaattgtttgaatcatgtaacaatcatataaattgctgtttatattgttgtgaaaatgagttgacaaaagtcggtatagatatgtagacatcctatttttagcgaggtaggttgataaggcatatcggataaatttataagccataaaatagataaatagtgtttgtatccaaaaatatgagaaagttaaaactatttttcaaaataaacatgattcaccacataaataaatatacataagctatcgataacaacttaagaaaggtggatatataaatgaaaagaaagattattatggattgtgatccaggacacgatgatgcaatagcattaattttagcgggggcaattgacagtccactagagatattagctgtaacaacagtcgcaggtaatcaatcagttgacaagaatacgacaaacgccttgaacgtattggatattatgggacgccaagatatagcagtagcgaaaggtgcggataggccgttaattaaaccagctgcctttgcttctgaaatacatggggaatctggattagatggtccgaaactaccgtcgacaccatcacgtcaagcagttgcaatgccagcatcagatgtgattataaacaaagtgatgacgagtgatacacctgtaacaattgtagcgacaggtcctcttacgaatgtagcaacggcattgattcgtgagccaagaatcgctgagcatattgaatctattactttgatgggtggtggtacatttggaaattggacgcctacagcagaattcaatatttgggtagatgctgaagcagcgaagcgtgtttttgaaagtgggattactataaatgtgtttggtttagatgtaacacatcaagttttagccgacgatcacgtgattgaacgctttgaaagtatcaataatcctgttgcacagttcgtcgtagaattattgcaattctttaagaagacatacaagactcactttaatatggatggtggtccaatacatgatgcttgtacaattttgtatttgttacaaccagaattgtttacaatggtacccgttaatatcgacattgaacatcaaagtccactaacttatggcactatggctgtcgatttaaatcatgttacaggtaagcctgccaatgcttattttgctacagcagttgatgttgaagaagtgtggaacttgatagaccataagttacgtacatacgaataataatacttaattaaatagatacagttaaccctaaggcgcctgatataagcgtccttagggtttttgtattgggttacaatggtcatgacaatttgataatgattgagatatgtatgttaaaaatgcttcaaaaaaacacaaaacacaaaaatatatgcaaaaatttcaattgctttattttaaaagattaaaatcacaaaaaatatagatataattgaaatgttgttaaaacatcacaatgatgtacatgctcattttgaaaatatgtgttcaaagtgtgtacatcggtgtgacgattgatgataaattgagctcagatgctcaaaggagaatcgaacatgaacggggataatcagcaaatactcagagaaattgtattgaatcctactattcatggtaaagaacttgaatcgatatttggtttgtctcgtagacaactaggatatcgcattcaaaaaatcaatttgtggcttgaacaagagggttatccaaaacttgaaagaacaagccaaggaaattttattgtaagttctgaaatcatgacgttattcaagcgagatgtatcggagcagcaaatgttaaacggcaacaatgtcatttttagcatagaaacacgtcgttattatttaatgctcatgctttttagtaaggaaaacgcaatgtctctaaaccatttttcaattgatttacaagtcagtaaaaatactgtcattcacgatataaatcatgtgaaagagcaattggaaaatcatggtttgtcacttaagtattctcgaaaacatggttatgaaattgttggtgatgaatttgaagttcgccgtttcttcattaagttgattgatcaaaggttgaatcatgatattactaaaagtgaagttttaaaggcgctcaacttaacattcgaagatatcgcatatcaaaaagacaagatcaaacaggtagaacaatttttgaagagtcgctttatagacaaatcacttagttcattgccttatgtcctttgtgtgattcgtagacgaattcaaagtggtcatgtgatgaatccattaaatattaattatcagtatttgagggatacgaaagaatatcaagcaacggagattatgacgcaacatgagccggatttgccagaagcggaaaagttatatttgacattacacttactttcaacaagtgtgcaatggactgatttgcaagaatcagatagcatatcgaatttaacgatggccatcgctcaaatgattcaccattttgaacaaatcacttttattaacattgaagataaggagaaattatcacagcaactcttgttacatttaacgcctgctttttataggattaaatataacttaacggatcgtgatgaattaataaatcctttacaaggaaattatcaatccttatttcatatggtgaaacaatcatgtcaatcgttaactgaatatttcggaaaatcgttgcctgataatgaaatagcatatttaaccatgttgttcggaggtagtttgagacgtcaagatgaaaacttcgatggcaagataaaagctattatcgtgtgtacacaaggcacgtcagtatcacaaatgatgttatacgagttgcgaaacttatttccagaaattattttcttagatgcgatttcacttagaacatttgaaaattacacattagattatgacatcgtcttttcaccaatgtttgtcctaacacataaaaaattatttatcacaaaagtagctttatctgaaaatgagcaacgaaagttacgtaaagaagtgatgaagtacattaataaggaatcggctgacattgataaggaaataaacaagttaatggcattaattgaacgcacaacgacagttaatgacattacagaactacgtgatggtttagaagattttattgccaattataattcaatttcaaccattaatggatcgattgtcacacaaaataagacattagatttagctgacttgataccggcaaggcacgtgaaaagaatgcatcatgttgaaaatattgatgaagctattgctaaagcaagtgatgtgttagttgctaatcattttattgatattaaatatattcatgagatgcaacaggtatttgatgattcgtatatggttatcatgcaaaatattgctattccacatgcatactctgaaaagcatgtacataaaacagcgatgagtatgttgatattacaagaaccaatatacatgtcagatggcacagcaatccatattattgtacctattgctgctgttgataaagtgacacacttaagagcgttactacaattgagagatgtggcgcaagacaatgacgcaattaagcgcatcatacaaagtcgcaaaaattctgatgtaaatgagattttaaaaaattattcaaataaagaagcgagggaaaatggatgggacagcaattagtgcataaagaaaatataatgctcaatttgtcggcaactgataaagaatccgtattgtcacaaatgtcagatgtgttatttcaaaatgggttcgtgaagtcaacgtttaaagatgcagtcatcgacagagaaaaagaatttgctactggtttaccaacgcatctatgttcggtcgctataccgcatacagatgtcgaacatattaaccatagaacgataggtgtggctgttctagaaaaagaagtgccgtttattgaaatgggaacacttgatcaacagacagaagtgaaaatcgtttttatgttagcaatggataaagtagatgatcaacttaagctgttacaacagttgatgcaaatttttcaaagtgaagaaaaattggagcagattctacgaacgaaagatgaaacaattttagcaacactaatcaatgattatttggaatataactaaaaattaattggaggaattgaaaatgaaacaagtattagtagcgtgtggtgcaggtattgcaacgtcaacagtagtaaataatgcaattgaagaaatggcaaaggaacacaatattaaagtagatattaaacaaatcaaaattacagaagttggaccttatgaagacactgcagatttattagttacaactgcaatgacaaaaaaagaatataaattcccagttatcaacgcacgtaatttcttaactggtattggtattgaagaaacaaaacaacaaatcttaacagagttacaaaaataacggaattgatatgtaacgtgggtcgataacatattaatatatgcaaattgcatataaatgactatcacgacaaatgattgttgatgacatagaaacgcagtgactgtaattcaaaaggactgcagtcgaatttagcaagggttgtcgttgaaatgactgtaacgtcaaatgtaatcacaatcggaaagtatcgtgacaatgcatatataacagggagggtttaaatatgagttacttcactgattttgtaaggggatttttagatttaggtgcaactgttattttaccggttgtcatattcttgcttggcctattctttaggcagaaaattggagcggcatttaggtctggtttaacaataggtgtggcttttgtagggattttcttagtcatcgatttattagttaaaaatttagggccagcagcacaagcgatggttaaaaatttaggcgtcagtctgaatgtgattgatgtaggttggccagcaacatcatctatcgcttgggcatcatctgtcgcagcatttattattccactcggaatcatagttaacgttgtattgctagtaactaaagtgacaaagacgatgaatgtagatatttggaatttttggcattatacgtttacagcagcaatggtttatgccgtatcaggcagtatttggcaagcgttattagcagcagttattttccaaattatctgtttgaaagtagcagattggacagcaccgatgatgagtgagttctttgatttaccaggtgtatcgattgctacaggaagtacaatttcttatgcaccaggtatttacttagttaaattgttacaaaaagtacccggtctgaataagttagatgctgatcctgaaacaattcaaaaacgttttggcgcatttggagagtctatatttgtcggcttaattttaggtttaggtattggtgtgttagcaggttacaaacctggagacatcattaatttaggaatgtcaatggctgcagtaatggtattaatgcctagaatggtaaaaatcttaatggaaggtttaatgccagtttcagagtctgcaagaacatggctaaataaacgttttggcgaacgtgaaatttatattggattggatgcggctgtagcattaggtcatccagcagttatttcgacagcattaattttagtacctatcactgttttattagccgttattttaccaggaaaccaagtactaccttttggtgacttagcaacgataccatttgttgtcgcgtttattgttggtgcagcaagaggaaacattattcattctgtcattgtgggtacgattatgattgcaatttcactatatattgcaacagacgtagcacccattttcacagatatggcgaaaggtacgaatgtacaaatgccaaaaggttcatctgaaatttcaagtattgatcaaggtggtaatatcgttaactatcttatctttaaactatttagtctattcaattaaaaatcgaggtgtttgtggtgaaagctttagtaaaaacaagagaaggacatggcaacttagaacttcttgataaagaagttgcaacaccgctagatgataaagtaaagattaaagtacattatgcaggaatttgtggcacagatattcatacttatgaaggtcattataaagttaattttccagtgacattaggtcatgaattttctggtgaaatcgttgaagttggagcagacgttaaagattttaaagttggtgaccgtgtcacatctgaaacgacattctatgtttgtaatgagtgtgaatactgtaaatcaaaagactataatttatgcaaccatcgaaaaggtattggaacacaagttgatggcgcatttactaattatgtcattgcacgtgaagaaagtttgcatcatattccagacgaagtatcgtatcagtctgcagctatgacagaaccattagcatgtgcacatcatggcgtttctaagattcaagtcaattcaggcgatgtagcagttgtaatgggacctgggccaatcggattacttgtagcacaagtgttaaaaagtaaaggcgcaactgttgtggtaactggattggacaatgacaaagtcagattagataaagcagaagcattgcacatggattatgtagtcaatttacaacaaacagacttaaaaacgtatatcaatggaattacagacggttacggtgcagatgttgttgttgaatgttcaggtgcagttccagcagcacgacaaggtttggatattttacgcaaaaaaggtttctacagtcaaataggtatttttaaggatgctgaaattccatttgatatggaaaaagtgattcaaaaagaaataacagttgttggtagtagaagtcaaaagccagcagattgggaaccttcattgcaacttatggcggatggtttagtaaatgctgaagctttggtgacaaaaatatatgatatttcgaaatgggacgaggcgtatcaacatttaaaatccggcgaaggtattaaagcattacttaagccgctcgatttagatgaaaatgaaggagagaattaatatggtagaatcaatgctaacttttatgcttgggccattaagacaaatcactgatttttatatggaacatttactcgtaagtaattccattgtcattgcaggttattttgcgacaggtatttttaaaaagaaaaaagttgtgaattaaatcaaatttgaggtgatttacaagtgaaagcattgaaattatatggcgtggaagatttacggtatgaggataatgaaaagccagtcattgaaagtgcgaatgacgttattattaaagtacgagcgactggcatatgtggttcagacacgtcacgatacaaaaaaatggggccatacattaaaggtatgccatttggtcatgaattttcaggtgtagtagatgccattggaagtgatgttacgcatgttaatgtgggcgacaaagtgacaggttgcccagcaataccttgttatcaatgcgagtattgtttaaaaggtgaatatgcacgatgtgaaaagttattcgtcattggctcatatgaacctggatcgttcgcggaatatgtcaaattgccagcgcaaaatgttttaaaggttccagacaatgttgattacattgaagcagcaatggttgagccatcagccgttgttgcgcatgggttttataaatcgaatatacaacctggtatgactgttgcagtaatggggtgtggcagtataggtttgttagctattcaatgggcacgaatatttggtgctgcacatatcatcgctatagatatagatgcgcataaactagatattgcaacatcattgggcgcacatcaaacaatcaattcaaaagaagaaaatcttgagaaattcatcgaaaatcattacgccaatcaaatcgatttagctatagaatcatcaggtgctaaagttacgattggtcaaatattgacgctacctaaaaaaggtggcgaggtggtattactcggaataccatatgatgatattgagattgatcgcgttcattttgaaaaaattctgcgtaacgagttgacagtatgtggctcttggaactgtttgtccagtaattttccgggcaaagagtggacggcaaccttacattatatgaagacgaaagatattaatgtaaagcctattatttctcattttttaccgttagaaaaaggcccggagacatttgataaattagttaacaagaaagaacgatttgataaagtcatgtttacgatttattagtatgcacctttgaggacgaaaacgctggtatagttatagctatgaaagtgcgaatgccgtctggtctatagatactatcgaaataattcatcttcgaatatacgttgataaatagccggtttacttgtgtgaaatatgcttgtgaatcggttgttttgcattttgtatacttaaaatgagatggcaatatttgataatttttaaagtgaaaatcaagtacagccacttaataagataaatttattataatatatggtaaaatgatggcagtaataatgaatttgaaaaagagtaaacattaatacctttaacaatttaatatcgtcagagttaatgattaactgcatggcaaaacaacttagaatggtcagttacaaaaatacatttttataaaaaattatcacattattgtgacaactatctttggattaataaaagaggcaagtgagcaataggttaggcttatgtgcgggcataggtcagtaatgtataaatggaaatgatgtaatgacagaatggaggacaacatgatttatgcaggtattttagcaggaggtattggttcgagaatggggaacgtgccattaccaaaacaatttttagatattgataataaaccgattttaatccatacaattgagaagttcattttagtgagtgaatttaatgagattattatcgcaacgccagcacagtggatttcccatacacaggatattttaaaaaaatataacattacagatcaacgtgtcaaagtagttgcaggtggtacggatcgaaatgaaacaattatgaacattatcgaccatattcgcaatgtaaatggaattaataatgatgatgtgattgtaactcatgatgccgtaagaccatttttaactcaacgtattattaaagagaacattgaagtagcagcaaaatatggtgcagtagatacagtcattgaagcaattgatacgattgtaatgtctaaagataaacagaacatacacagtatccctgtaaggaatgaaatgtatcaaggccaaacaccacaatcatttaatattaaattattacaagatagttatcgcgccttaagtagtgaacaaaaagaaatcttatcagatgcatgtaaaatcattgtcgaatctggacatgcagttaaattggtacgtggagaactatacaacattaaagtgacaacaccgtatgatttaaaagtagcaaatgccattattcaaggtgatattgccgatgattaatcaagtatatcaactcgttgcaccgagacagttcgacgtcacatataataatgttgatatttatggtaatcatgtcatcgtaagacctttatacttgtctatttgtgcagctgatcaaaggtattacacaggtcgaagagatgaaaatgtactacgcaaaaaattaccaatgtcattagttcatgaagctgttggtgaagttgtatttgatagtaaaggggtatttgaaaaaggtacgaaagtagtaatggtaccgaatacacctacagagcaacatcatattattgcggagaattacttagcctctagttattttagatctagtggttatgatggttttatgcaagactacgttgtgatggcacatgatcgtatcgttccgctgcctaatgacattgatttgagtacgatttcatacacagagttagtgtcagtaagttatcatgctatacaacgatttgaacgtaaatctatacctttgaaaaccagctttggtatttggggtgatggtaacttaggttatattactgctattttgctacgtaagttgtacccagaagctaaaacttatgtatttggtaagacagactataaattaagtcatttttcatttgtagatgacatctttacagtaaatcaaataccagatgatcttaaaattgatcatgcatttgaatgtgttggaggtaaaggaagtcaagttgcacttcaacaaatagttgaacatatttcaccagaaggcagtattgctttgttaggcgtaagtgaattacccgtggaagtgaatacacgattagtacttgaaaaaggattaacgttgattggtagtagtcgaagcggctctaaagattttgagcaagttgttgatttatatcgtaagtacccagacatagttgaaaagttagcattattaaaaggacatgaaattaatgtatgtacgatgcaagatatcgtccaagcgtttgaaatggatttatcgacatcttggggaaaaacagtattgaaatggacgatttaataaaccgatgggggaataacaatgacaaaaacgaaacaagcaatacatattgataacatatactgggaacgtgttcagttatatattgaaggacatagtgaaggtgtcgatttaacatcaggacaatttgttctgaggaatttaaccgaaacaaaaacattagaagcaaatgaaatgaaaatagacggtaatacatttatatgtagattcaacgtcgcaatattagacgatgggtattatttaccaatggataaatatttatttgtttatcatgaccagttagagtatattggacaacttaatccaaatattattgatcaagcttatgcggcattaaatgaagagcaaattgaagaatacaatgagctgactacacaaaatggaaaagtgaactatttattagcgtatgatgctaaagttttccgtaaaggtggcgtatcacaacatacggtctataccattactccggaaatagcaagtgacgttaacgaatttgtatttgatattgaaatcaccttacctcaagagaaatcaggggtcattgcgacaagtgcacactggcttcataaacaaggtcataaagcttcatttgaaagtagaagtttcttatttaaagctatttttaatattacaaagttactacatattaaaagaagcaaaacaatattattcacatcagattcgcgtccgaatttatcagggaatttcaagtatgtatatgatgagttactacgccaaaaagtagattttgattatgatattaaaacggtatttaaggagaatattacggatagacgcaaatggagagacaagtttagattgccatatttacttggtaaggccgattatatttttgttgatgatttccatccattaatttatacggttcgctttagaccatcacaagaaattattcaagtgtggcatgctgttggtgcctttaaaacagttggctttagtcgtacaggtaaaaaaggtggtccgtttatcgattcattaaaccatcgtagttacacgaaagcatatgtttcatcagaaaccgatattccattttatgctgaagcatttggaattagagaagaaaatgttgtaccaacaggtgtaccacgtactgatgtactatttgatgaagcttatgcaacacaaattaaacaagagatggaagatgaattgccaattataaaaggtaagaaagttattctattcgcaccgacatttagaggtaatggtcacggtacggcacattatccattttttaaaattgattttgaacgtttagcaagatactgcgagaagcataatgcagttgtgttattcaaaatgcatccgttcgtaaaaaatagacttaatatttcacgtgaacatagacaatactttatcgatgtgtcagatcatcgtgaagttaacgatattctctttgttacagacttgttgattagtgattattcatctttaatatatgaatatgcagtatttaaaaagccgatgattttctatgcatttgacttagaagattacattacgacgcgtgatttctatgaaccatttgaatcatttgttccaggtaaaattgtacagtcctttgatgcattaatggatgctttggacaatgaagattatgaggttgaaaaagttgtgccattcttagataaacattttaaatatcaagatggtcgctcaagtgaacgtttagtcaaagatttgtttagacgctaatgttggcatatattacttgccatgcaaatgagtcataaggcatagttttcaagaagggttctgacaatgaagtgagcaacatgtcatgatgagaagcaggactatacaatgagaataaccttttgatttttcatgcataaggcgattcaatcaaaagcaatcaccttccaactgaattgtcattttgtaaaataaaataatcgatccaatcgttatctaattcataaatgtgtaaacacatacgttatgaatggataacgattttttgttatgttaaagtggtacattaatcatgtatttcgtatgataattaacgacaagtgtaatggttaaatgtattttatgatgaaatgctataataggcatggttacaatgagcttgctcatacatattaatataattacaaaaacacgtcggaggtacgacatgattaaaaatacaattaaaaaattgatagaacatagtatatatacgacttttaaattactatcaaaattgccaaacaagaatctaatttattttgaaagctttcatggtaaacaatacagcgacaaccccaaagcattatatgaatacttaactgaacatagcgatgcccaattaatatggggtgtgaaaaaaggatatgaacacatattccaacagcacaatgtaccatatgttacaaagttttcaatgaaatggtttttagcgatgccaagagcgaaagcgtggatgattaacacacgtacaccagattggttatataaatcaccgcgaacgacgtacttacaaacatggcatggcacgccattaaaaaagattggtttggatattagtaacgttaaaatgctaggaacaaatactcaaaattaccaagatggctttaaaaaagaaagccaacggtgggattatctagtgtcacctaatccatattcgacatcgatatttcaaaatgcatttcatgttagtcgagataagattttggaaacaggttatccaagaaatgataaattatcacataaacgcaatgatactgaatatattaatggtattaagacaagattaaatattccattagataaaaaagtgattatgtacgcgccaacttggcgtgacgatgaagcgattcgagaaggttcatatcaatttaatgttaactttgatatagaagctttgcgtcaagcgctggatgatgattatgttattttattacgcatgcattatttagttgtgacacgtattgatgaacatgatgattttgtgaaagacgtttcagattatgaagacatttcggatttatacttaatcagcgatgcgttagttaccgactactcatctgtcatgttcgacttcggtgtattaaagcgtccgcaaattttctatgcatatgacttagataaatatggcgatgagcttagaggtttttacatggattataaaaaagagttgccaggtccaattgttgaaaatcaaacagcactcattgatgcattaaaacaaatcgatgagactgcaaatgagtatattgaagcacgaacggtattttatcaaaaattctgttcattagaagatggacaagcgtcacaacgaatttgccaaacgatttttaagtgataacttaaaaacaataaaaaattataaattaattagttaagtgatataaataataaacgaaatgtttgcttgtatgttattatttgtgtatgaaaacgtctgatataatgtaatataggtttaaacaaaatatgctaaaatataagcaaaatatgtataattttaagtaatacacagacatttagagttttgattttaaaatgagttttcaattggaaaatgcaacgaaatttaaataattaaatatagatatagttgaatggaggaagtattttatgaaatacgctggtattctagctggaggtataggctcaagaatgggtaacgtacctttacctaaacaatttttagatttagacaacaaaccgattttaatccatacattagaaaaatttattttaattaatgattttgaaaaaattattatcgcgacgccacaacaatggatgacgcatacgaaagatacacttagaaaattcaaaatttctgatgaaagaattgaagtcattcaaggtggtagcgatcgtaacgatacaattatgaatatcgttaaacatattgaatcaacaaatggtattaacgatgacgatgtcattgtgacacatgatgcagttagaccatttttaacgcatcgtattattaaagaaaatattcaagctgctttagagtacggtgcagtagatacagtgattgatgctatagatacgattgttacatctaaagataatcaaacgattgatgcaattccagtgcgtaatgaaatgtaccaaggtcaaacacctcaatcgtttaatattaatttattaaaagaaagctatgcacagttgagtgatgagcaaaagagtattttatctgatgcttgtaagattattgtagaaacaaacaaaccggttcgacttgtaaaaggtgagttatataacattaaagtaacaacaccttacgatttaaaagtagcgaatgctattattcgaggtggtattgccgatgattaatcaagtatatcaattagttgcacctagacaatttgaagttacgtataacaacgtagatatttacagtgactatgtcattgtacgtcctttatatatgtcaatttgtgctgccgatcaaagatattatactggtagccgtgatgagaatgtcttatctcagaaattgccaatgtctttaattcatgaaggtgttggtgaggtcgtatttgacagtaaaggtgtgtttaataaaggtacaaaagtagttatggtaccgaatacgccgacagaaaaagacgatgtcattgctgaaaactatttaaaatcgagctacttcagatcaagtggacatgatgggtttatgcaagattttgtgttgctaaatcatgatagagctgtaccactacctgatgatattgatttaagtattatttcatatacagagcttgtaacagtaagtttgcatgctattcgtcgttttgaaaagaaatctatttcaaataaaaatacatttggtatttggggtgatggtaacttaggttacattacagccattttattacgtaaattatatccagagtctaaaatatatgtctttggtaaaacagattataaattgagtcacttctcatttgttgatgatgtcttctttattaataaaatacctgaaggcttaacatttgatcatgcatttgagtgtgtgggtggtcgcggtagtcaatcagccataaatcaaatgatcgattacatttcaccagaaggaagcattgcactgttaggtgtaagtgagttcccagtagaagttaatacacgtctagtattggaaaaaggactaacgttgattggtagtagtcgaagtggttcaaaagatttccaagatgttgtagacttatacattcaatacccagatattgtagataaattagcgttgttaaaaggtcaagaatttgaaattgcaacaattaatgatcttacagaagcttttgaagcagacctgtctacatcttggggtaaaacagtattaaaatggattatgtaaatagaaaaggatgaattaacgttggttaaaagtaagatatatatagataaaatctattgggaacgtgttcagttattcgttgaaggacatagtgaaaacctagatttagaagatagtaattttgtattaagaaatttaactgagacacgtacaatgaaggcgaatgatgtcaaaatagatgggaatcaattcgtttgtcgtttcaatgtagctatcttagataatggttattacttacctgaagataagtacttattagtgaatgagcaagaacttgattatattgcacagttaaacccagatgtgattaatgatgcatatcaaaatctaaagccagaacaagaagaagaatacaacgaattagaaacacaaaatggtaaaatcaatttcttattgcagacttacctaaaagaatttagaaaaggcggcatttcgaagaaaacggtttatactgttacacctgaaatttctagcgatgttaatgaatttgtccttgatgttgttgtaacgactccggaagttaaaagtatttatatcgttcgtaaatataaagaattacgtaagtatttccgcaaacaatcatttaatacaagacaatttatttttaaagcgatatttaatacgacgaaatttttccacttgaaaaaagggaatacggtgttgttcacatcagactctagaccaacgatgtctggaaactttgaatacatctataacgaaatgttacgtcaaaatttagataaaaagtatgatattcacactgtttttaaagcgaatattacagatagacgtggcatcatcgacaagtttagattgccatatttacttgggaaggcagactacatctttgttgatgactttcacccattgatttatacagtgcgttttagacgttctcaagaagttattcaagtatggcatgccgttggtgcctttaaaacagttggctttagtcgtactggtaaaaagggtggaccatttattgattcattaaatcatcgtagctatacaaaagcttatgtatcatctgaaaccgatattccattctacgctgaagcatttggtattaaagagaaaaatgtagtgcctacaggtgttccacgtactgatgtactatttgatgaagcttatgcgacacagatcaaacaagagatggaagatgaattaccaattattaaaggtaagaaagtcattcttttcgcaccaacatttagaggtagtggtcatggtacagcacattacccatttttcaaaattgattttgaacgtttagcaagatattgcgaaaaaaataacgcggttgtattatttaaaatgcatccatttgtgaaaaatagacttaatattgcagacaaacataaacaatattttgttgacgtttctgactttagagaagttaatgatatactgttcataacagatttattaattagtgactattcatctttaatatatgaatatgcagtatttaaaaagccaatgattttctatgcatttgatttagaagattatattacgacgcgtgatttttatgaaccatatgaatcatttgttccaggtaaaattgtgcaatcatttgacgcattaatggacgccttggacaatgaagattatgaaggagaaaaagtcattccattcttagataaacattttaaatatcaagatggccgatcaagtgagcgtttagtcagaaatttatttggtagctaagtttatatagtagtcaaagtgggagaggtataatgatgaaattttcagtaatagttccaacatacaattcagaaaagtatataacagaattacttaatagccttgcgaaacaagattttccgaaaactgaatttgaagtggttgtagttgatgactgttcaacagatcaaacgttacaaatagttgaaaagtatcgcaataaattgaacttgaaagtaagtcaactcgaaacaaattctggtggtccaggtaaacctagaaatgtggcgttaaaacaagcagaaggtgaatttgtattatttgtggactccgatgactatataaacaaagagactttaaaggatgcagcagcatttattgatgaacatcactcagatgtcttattgattaaaatgaaaggtgttaatggtcgtggtgtaccacaatctatgtttaaagaaacagcacctgaagttactttgttaaattcaagaattatctatactttaagcccgactaaaatctatagaacagcattactaaaagataatgacatttattttccagaagaattaaagagtgcagaagatcaattatttacaatgaaagcatatttaaatgcaaatcgaatcagtgtgttaagtgataaagcgtattattatgctacaaagcgtgaaggtgaacatatgagtagtgcgtatgtttcacctgaagacttttatgaagtcatgagattgattgctgtagaaatattaaatgcagatttagaagaagcccataaaaatcaaatcttagcagaatttttaaatcgtcattttagtttttctcgtacgaatggcttctcacttaaagttaaactagaagatcaaccacaatggattaatgctctaggagactttatacaagcagttccagaacgtgtagatgcattggtgatgagtaaattacgaccattgttgcactacgcgagagcgaaagatatagacaactatagaactgtggaagaaagttaccgtcaaggtcaatactaccgttttgatattgtagatggtaaattaaacattcaattcaatgaaggcgaaccatactttaaaggcattgatatcgctaagccaaaagtgaaaatgacagcatttaaatttgataatcataaaattgttacagagctaacgttaaatgaatttatgattggcgaaggacattatgatgtcagacttaaattacattcacgaaacaagaagcacacaatgtatgtacctttaagtgtcaatgcgaataaacaatatcgttttaacattatgttagaagatattaaagcgtatttacctaaagaaaaaatttgggatgttttcttagaagtccaaataggtacggaagtatttgaagtgcgtgttggtaatcaacgtaataaatatgcatatactgcagaaacaagtgcattaattcatttgaataatgatttttatagattaacaccgtatttcacaaaagactttaataacatttcgttatactttacagctattacattaacggattcaatctcattgaagttaaaaggtaaaaacaaaatcattttaactggtctggatcgtggttatgtatttgaagaaggtatggctagtgtcgtactaaaagacgacatggtgatgggaatgttaagccaaacatcagaaaacgaagtgcaaatcttacttagcaaagatattaaaaagcgagacttcaaaaatattgttaagttaaacactgcacatatcacttatccactaaataaataataaatgccctcaaatcattgtgagccaacatgatttgagggctttattttgctgtttatgacatgattatgacatttccctgattttcattttcatatacattaaattgtatacactggaaatgaggaggttatctataatgataaataaaaatgacatagtagcagatgtagtaactgattatccgaaagcagcggatatttttagaagtgtgggaatagatttttgttgtggcggacaagtaagtatagaagcagcagccttagaaaagaaaaatgtagatttgaacgaattattacagcgtctcaacgacgttgaacaaacgaatacaccaggttcgttaaatcctaaatttttaaatgtttcatcacttattcaatatattcaatcagcatatcatgaacctctaagagaagaatttaaaaatttaacaccttatgtgacgaagttatcgaaagtacatggacctaatcatccatatttagttgagttaaaagaaacatacgatacatttaaaaatggcatgttagagcatatgcaaaaagaagacgatgtcgattttccaaaactcattaaatatgagcaaggtgaggtagtagacgatattaatactgtgatagatgatttagtttcagaccacattgcaacgggagaattgttagtaaaaatgagcgaattaacatctagttatgaacctccgatagaagcgtgtggtacttggcgacttgtttatcagagattaaaagcacttgaagtgttaacacatgaacacgtacatttagagaatcacgtattatttaaaaaagtatcataaataacgcgattagaaactgttggcaaaaataagtccagcagtttttcgctatgtataaaagtcataatagtgacataaacagcattatttgaaaagaaaaatggtcaacttagcataaaaattgatatgaaaatttaatggtatagataattaaatagtagcgtgtttttttaataatttattcatgaattttacatgcactattatgataaaataaacataattataattcactgaggtgctatcgtgctatcgctaacaatgttattacttgagcgtgtaggtttaattattattttggcctatgtgttgatgaatattccatattttaaaaacttaatgaatcgtcgacgtacatggaaagcacgttggcaattatgtattattttcagtttgtttgccttaatgtctaatttaactggtatcgtcatcgatcatcaacatagtttgtcaggaagtgtgtacttccgtttagatgatgatgtatctttagctaacacacgtgtattaacgataggtgtcgcaggattagttggtggcccttttgtaggtctatttgttggcgttatttcaggtattttcagagtgtatatgggtggggcggatgcacaagtttatcttatctcatctatatttattggtataattgctggttattttggcttacaagctcaaagacgcaagcgttacccgagtattgcgaaaagtgccatgattggaattgttatggaaatgattcaaatgttgagcattttaacattttcccacgacaaagcatatgcggttgacctcatatcattaattgcactaccaatgattattgttaatagcgttggtacggcgatttttatgtctattatcatttcaacattaaagcaagaggagcaaatgaaggctgttcaaacacatgatgtactgcaattgatgaaccagacattgccgtattttaaagaaggattgaatagagaatcggcacagcaaattgcgatgattattaaaaatttaatgaaagtatctgccgtagcaattacaagcaaaaatgaaatcttatcgcatgtaggtgcaggtagtgatcatcacataccaacaaatgaaatattaacaagtctgtctaaagatgtattgaaatcaggaaagttgaaagaagttcatactaaagaagagattggttgtagtcatccgaattgcccgcttagagcagctatcgtgataccacttgagatgcatggttctatcgtcggtacattgaagatgtattttacaaaccctaatgatttaacttttgtggaacgtcaacttgcagaaggattggcaaatatttttagtagccaaattgaacttggtgaagccgaaacgcaaagtaagttattgaaagatgctgagattaagtcattacaggcacaagtgagtccacattttttcttcaattcaattaacacgatctcagctttagttagaataaatagcgaaaaggcacgagagttactattagaattgagttattttttcagagcgaatttacaaggctctaagcaacatacgattactttagataaagagttaagtcaagtgcgtgcatacttatcactcgaacaagcacgttatccaggaagatttaatatcaatattaatgttgaagacaaatatcgcgatgtgcttgtaccaccatttttaattcaaattttagttgaaaatgccatcaaacatgcgtttacgaatcgaaagcaaggtaacgatattgacgtgtcagtgattaaagaaactgcaacacatgtacgtattattgtacaagataatggtcagggtatttctaaagataaaatgcatttgttgggagaaacatctgtagaatcagagtctggaactggtagtgctttagaaaatttaaacttacgcctaaaaggattatttggaaaatccgcagcattacaatttgaatcgacatcgagcggtaccactttttggtgtgtacttccttatgaaagacaagaggaggaataaatatgaaagcattaatcatagatgatgagccattagcacgtaatgaattaacatatttattaaatgaaattggtggttttgaagaaattaatgaggcagaaaatgtaaaagaaacattggaagcactactgatcaatcaatatgacattatatttttagatgtcaatttaatggatgaaaatgggatcgaattaggagctaagattcaaaagatgaaagagccacctgcgattatttttgcaactgcacatgaccaatacgcagtacaggcatttgaattaaatgcgacagactatattttgaaaccgtttggtcaaaaacgtattgaacaagcagtcaataaagtgcgtgcgactaaagccaaagatgataataacgcaagtgcaattgcgaatgatatgtcggcgaattttgatcaaagcttacctgttgaaattgacgataaaattcacatgttaaagcaacaaaatattattgggattggcacacataatggtattacaaccatacatacaacgaatcataaatacgaaacaacagagccattgaatcgttatgaaaaacgattgaatcccacttattttatacgtattcatcgttcatatattattaacacgaaacacattaaagaagtgcaacaatggtttaactatacttatatggtaatattgacaaatggtgtcaagatgcaagttggacgttcatttatgaaagattttaaagcgtcgataggattactttaacagtaatccttttttttatgcattttacctatgatattttgtatttcggactaaaaatcacgcaaatcgaagtgagccatctatactttagttaaatcaaacgtaggaggcaatggtcgtgaaacaacaaaaagacgcatcaaaaccagcacacttttttcaccaagtcattgtaattgctttagtactctttgtatcgaaaataattgaatcatttatgccaattcctatgcctgcatcagtaatcggtttagtattattatttgtattattatgtactggtgctgttaagttaggcgaagtcgaaaaagtaggaacgacactaacaaataacattggcttactcttcgtaccagccggtatctcagttgttaactctttaggtgtcattagccaagcaccatttttaatcattggactaataatcgtctcaacaatactattacttatttgtactggctatgtcacacaaattattatgaaagttacttcgagatctaaaggtgacaaagtcacaaaaaagatcaaaatagaggaggcacaagctcatgattaaccacttagcactaaacacaccttacttcggaatactgttatccgttataccatttttcttagcgaccatattatttgaaaaaactaatcgtttcttcttattcgcaccgctatttgtcagtatggtatttggtgtggccttcctctatttaacaggcattccgtataagacttacaaaataggtggagacattatttacttcttcttagaaccggcaacaatctgttttgcgattccgttatataaaaagcgtgaagtgcttgttaaacattggcatcgtatcatcggaggtattggtatcggtacagttgtagcgttattaattattttaacttttgcgaagttagcacaatttgccaatgatgttattttatcaatgttacctcaagcagcaactacagcgattgcgttaccagtatcagctggtatcggtggtataaaagaattaacatcattagcagttattttaaatggtgtcattatttatgccctaggtaataaattcttaaagcttttccgaattactaaccctattgcccgaggattagcacttggaacaagtggtcacacattaggtgtagcaccagccaaagaattaggacctgtagaagaatcaatggcaagtatagctttagtgttagttggtgtagttgttgtagcagttgtgcctgtctttgtagcaatattcttctaaaacgaaaaacctaagcaagataatagcaatttgagccattgttattatcgtaaaaaaacgtctatactccagtttataactgggatatagacgtttttatgtatttattactttttactaggaatataaaactgtgcatgacgataatgaaatacgatgtcagatgaatcaaagggtttgccagtcattgtataaaaagtctggtggtaacgtaaacatggttcacctgtagacaattgtagtaatgaagcttcacttgaagtgagttgatctacattaaagaaaatatctgaaaaaccaatacgaagtttcatgtttgattctaaatagtcgaagatagagcccttagcaatatcatcatttaaatatttcacgatttctttatgataataagaatattcgatacataaaacatcatcgtccacgaatcttaatcgctctaaatagtagacggtatcatctgcatttaattggagctcatcttgtacagatttaggtggcgttgcaatctccttaaaaacaagtaccttacttgtcattcggtgttcacctaaacttttagagaaaccattagtcttaaagacgttgatacgattggcatcagcaatatttctcacataaataccactgccttgtgcttgatagatcaaaccatcttgttccaataagcctaatgctttaatgatagtactcttacttacttgataacgttcttttaattgcgtcacgcttggcaatttatcaccgggtttgaaattagattgatgtataaacgcattaagttgcttagcaatatgttcatactttaacaatattctgtcctcgtttcactttgtctgtaattattatagcacaaaatattataattgtatcggcgtttacaaattgaaccggtacaattataattggaggtaagtaaatacattttcattctactatcaagttgagggggtaatatttatgagcaataaatataaagaacaagcccaagacattcttacagctgtaggtggtgtcgaaaacattgttgatgcaacgtatgatacgaagtgcattacaattcatatgcaacatacaattccttctacagcaaatgaagtgaaacaaatagttgatgtgacatctgtagcagaaaatgatacgcagttagtcataaaattaaatggaaatgtcgatgaagtgtatcagcaattacagcgattaattaagaatgctaatgtcgaagagagtgagaatactgacaatattaatagtcaagatacaagttatacacctcaagtaaaagtaacaacaccaattttagtgaaagcaccaatcgctggtcgtcgtattttacttaaagaagtaagagattcaatttttagagagaaaatggtaggtgaaggcttagcaatcaaagctcatgaagaatccaaagtaatcgcaccgttcaatggtttaatatctatgattgtaccaactaagcatgcagttggtattcaatcagaagacggtgtggacatagtcattcatattggcgtgaatacagttgacttggaaggtaaagggttcaagtgctttgtaaagcaaaatgatcatgttgaagcagggcaaacgttgttgcaattcgaccagcaatatatacaacaacaaggctacaatgctgacgttattgtcgttattagcaactctgccgatttaggaaaagtagaactgacaatgaatgaaatcattacgactgaagatgttatttttaaaatatttaaaaactaggagtgtgttgtaataatgacaaaattaccgcaaaatttcatgtggggtggcgctcttgccgcaaatcaatttgaaggtggatatgataaaggtggtaaagggttaagtgtaattgatgttatgacgagtggtgcacatggcaaagcacgtcagattacagaatctatagatcccaatcactattatccaaatcatgaaggtattgatttttatcatcgttataaggaagatattgccttgtttaaagaaatgggattgaaatgtttacgtacgtcgattgcgtggacacgtatctttccgaatggggatgaagatgtgccaaatgaagaaggactcgccttttatgatcgtatctttgatgaattaattgcacaaggtattgaacctgttgtgacgttatcacattttgagatgccacttcatttagcgaaacattatggtggatttagaaatagagaagttgtcgattattttgtgcattttgcgcgtgttgtatttgaaagatataaagataaagttacatattggatgacgtttaatgaaattaataatcagatggacacatcaaatcctatctttttatggacgaattctggggtagcattgacagaaaatgataatcctgaagaagtcttgtatcaagtagcacatcatgaacttttagccagtgctttagcagttcgtcttggtaaagagattaatccgaagtttaagattggaacaatgatttcacatgtacccatttatccatattcgtgtcatccgaaagatatgatggaagcacaaattgcgaatcgcttacgtttctttttcccggatgtccaagtgagaggttattatccaagctatgctaaaaaaatgttggcacgaaaaggatatgatgttggatggcaagaaggggacgacagtattttacagcagggcacggttgattatattggctttagttattacatgtctacggctgtaaaacatgatgttgatactacagttgaaaacaacatcgtcaacggtggtttgaatcattctgtggagaatccgcatatcgcaacgagtgattggggttgggcgattgatccagatggcttaagatatacattgaatgtgttatatgatcgttatcagttaccactttttattgtggaaaatggttttggtgcagttgatgaagtggtagatggacatattcatgatgattatcgcattgaatatttaaaagcacatattacagcagcgatagaagcagttgatcaagatggtgtagatttaatcggttatacaccgtggggaatcattgatattgtttcatttacaaccggtgaaatgaagaaacgctatggtttaatatatgttgatcgagataatgatggtcatggcacgatggaacgcttgaaaaaagattcgttctattggtatcaacaagtgatagcatcaaatggagataaattataaaggtatattataagtattttagggttagagcccgagacataaattaatatagtaggacctacagtgttataatggcgggcccccaacacaaagaatttcgaaaagaaattctacaggtaatgcaagttggcggggcccaacacagagaaattcgaaaagaaattctacaggtaatgcaagttggggaaggacagaaataaattttgcgaaaatatcatttctgttccaatcccgtgatgttaaaattttaagaaaaaaataatgccactaactatgtatagtgttaatgtttgagtgtttatgaaagtctttaaccaaaattgatgacttactaatcaacgataacgatattgttaagtagatgattagtgtcacaaagaaattaaagtgatagtcaaacatagatacaaagtacagttagtggcattatatttagtgctcttttttagcgacaaaagtaatataattcatatctttacgcaatttagtcatcgttttaaacattttacaaaacattggtcgattttcttttttcaaagcattgttgataatctttatagttccaacaataccttcgtcataaattaaaccttttggtgtcattaaactcattggaccagtatgataatgcacatgattaaaaccagcttgattatataaatctaaccagccaagtttcgtctgcggtgagacattgacattaattgctgcagataatgatttaacaacatgtgtggcatgtgattcattaacgatgacaatatcatgtgttaacaagatacccccaggctttaagactcggtagtactcgcgtaatgctttttcctttatggcgatgggtaacattgttaacattgcttcatttaaaacgatatcgaattgattgtcatcaaagggcaatttaacagcattcgcttgttgaacttgaatatatgattcaagacctgctgctgaaatgttttcctgtgctttttctaatgctttcttatttatatcaacgccttgaatgtgacagccatatgtatgagctagataaatagatgttgtgcacatattacatgccacttctaacacttgtttatcttgtgaaaatgccccttgttgtattaaccaatctgttgcttctttaccaccggggcgtagacgagtttttcctaatttagctaaaaatgtatgaccagcttctttagacatagcataacctccttttaattgataattattatcattaatatagcatatttatatgcgataatttggaagttaaaaagattacaaaaaattgtcacttcatttataactaaacatgagtcaacaagcataggtttagtggaaaattatttctaatagatgatgttttataaagataaaaaagcacagccatgatatacgaatgttgcatgttatatgctaaaccttcatatcatagctgtgtttgattcatttaaacttgatttacttcttctagtagaggaatagatgcttgcgcgccgtgtttttgtacagtgagtgagctcgctttattaccaaaatcaatagcatctgctaagttatcttgcgacttgtttaagcgactgacaaatgcaccaataaatgtgtcgcctgcagcagttgtatcaatcgcatttactttataagcttcgatgtgttggctttgatttttagtagcaaaatatgtaccttgcttacctagcgtaatcaaaacagtcttaatgcctatagataaaaagtaattggcattgtctttcatagattgttcattagttactttaatcccagataacaattcggcttctgtttcgtttggcacaataatatcgattaatgataataattcattaggtaatgctttcgctggtgcaggatttaatactgtcgtcacaccatgtgccttggcaatttcaaatgcagatataatagccgggatgggtacttctaattgtgcaacgacaaagtctgcattgattatagcgtcttttgcgttaataacatcttcaggtgtcatcgtcatattcgcaccaccataaacatagatggtgttttgtccttctgcattcacagtgataaaggcttggcccgtttttgcttcagctgttttgataatatatgatgtatcaatatgagctactttaaaatcttctaagatgaaatcagcaacgccatcagtgccaattttagtaataaatgttgtgtctgcttgcatgcgtgcagtggcaatagcctggttggcacctttacctccgccgaatgctttttgtgcttcttcaacatgtaatgtttcgcctggttgtgcatatctttcaactgttaaaaattgatcgacattcgttgaacctaaaataacaactttgttggtcatgtgtacgctcctttcaagttataacttttaaaaagtaacattcgattctaatgcaatattagagtagggcgttgtttcaccagtacgaatattacctttatttaatgggtgagctaagttacttttcatttcttcgtgaggaatgaaaatgatttcgatttccgatgaaatcaattgtttaatttgttgcaattgtgtagggttatgttcttttatttcttctgctaagtatattttttggatttccatttcttctaacactgtagctaagacatcaataaagcgtggtaagtttttagttacagctaggtcgatacgacgatgatcatttggaattggcatgccagcgtcattaatcgttaataaatcaaaatgaccaattgtcgcgattgcttttgaaatatgttcatttaaaacagctgattttttcatgacatctacactccttattttataaatactgtaacagaagcggctactaaaatgagtactaagccgatgattgtaataaccatttcttttgacgttttatgttgttttaagaaataaataccagttaatgtagcaagcacaacggatgtttgagaaagaataaatccagttgctaaaccattcatattaggttgtgctgaaataagatatgttaaagcaccaaatgcaaagaagaaacctgaaataatttgtaaccacgtaattttattacggaatggattctctgctttcatattcataaagccataaatgactgcaacaattaccatacccattgcttgaggtaaaaaggcagttaggccatcaatagaagttgcttgcggtgcagctgaatataaccagtatccaaattcaccaattaacagaagtaccactgcacgacgtaaatttttggcgttacttgcttctttgcgttcactccaaactgtcatacgcgctccaattagaataacgactaaagctgtaaatccaatgattttatgaccaatgcctggccaatttcctaatgcaaagacaccccataaagatgcgcctaataattggaatgctgttgtgactggcatggcacgagatgagccgactaattcgaacgctttaaatgtaatgatttgtccgaatccccatcctgcacctgataataaggcgaatagcaaattggttccagtagggaagccacttgatgtgactacggctaataaaatagcgaagattaacgtacctacagtagcaccgataatttgatgtacaggtttaccaccaaactttgaagcgactgttgggaagaagccccagccaattaaggggcctaacccgataagtaatgcaacaatgctcatgttatacacctcatgatttgtttttagtaaaacgttttaccagtgccatcgtaccatttttatttgtaaaatgcatgcgttttcataaaaactgaaaacgtttaaatcatatttaaaaattcatacattattattttaatttcttagtaaaataattatgattaaaaaccctcagcattaaagcaacgctaagggcctaacaatgatgagtatatttcggaagatacgtagttagtttgaaagatgatagccagttgttgcacgaatttttaaagtcgttggtaattcaatcatatcaatggatttatctaagtgctgtaatcgttgaagtaataaggttaaagatgttttgccaatatcagttataggttgtgccacagtagttaaaggtggcgagacgtacgctgcataatcaatgtcgtcataacctattaatgagatatctttcgggatactgatgccatgttcaattagtcctcgtaaaatgccaatagcgagttcatcgttaatagcgaagattgcagtggcagattgaaccatgatgtcatcaacaatggttagcccaccgcgcttagataattcagtatggacgatttgtggttctggcaattgattcgcgcgcaaagtatcgacaaatccagcgacacgagtcgacatattcgccatcatgtcatatggtgcaacaattatcatatggttgtgaccgagttctattaaatgttgtgctgcaagttgtccaccttgatattcatttgtccgaacaaaatctgtatagccttgatggtcattttgatccagtacgacataaggtacatgatgtttctttagatagttatttagggcgtccggggatgatatgtattgtgcgataattaatccgtcaatacctcgatcaattaaatgtttaatattgtcatacaaatcagttgctgtagatgttaaaaagcataaatcaacatcagatggtttatggtcatgaatactttgcatcagtgctgagaaaaacggatttgttaagctaggcaaaatgacgccaatagtttgaattttactgccgcgcaattgttttgcatgtttattaggggcatagcctaaacgttctgaaacagcatgtacgttttttatcgttgttgcggaaaaacgactatcattatgatttaaaatatgtgacacagttgtaactgatacaccagcttctctagcaacatctttaattgacacttttttcatattatattccttctctttattgtgtaattaatcatacagttatatacccgattattatattcatcatatcatgataaacatttgatgacatatgaagacgtgaatgacttttattgtctacaaacagacgtctgaagtatacgattaaggttgagacgagagaatatattattaaggttaataccttttaatgattatgataacaagaattttaaaatgtttattgtgattaaaaatacaaaagtcattattttaaagaataaaatatttgtttttgaacaaagtattaaaaaacataacgaaatgatgtatattgaactatgtgattgaaaaaatttttaattaaggcttgttaaaacttaagagaggatgtttttaaatgcaattcaaattaaaagaagaagagattattagttttttagaattgaaatatccagaaaaagagttcgaatatggtcgtttgttagttggacaacataaacgtgatgatttagatgtttattactttggtgatacgtttttaatgtgcacgattatttcattcaagacatttgaaattaaagaaacagtagaattatcatatgatgctgttaatcgtattgtgttaaaagatggatggttatttagaaaaatgagaatagaaacaatgcaaaaagtgttaaaatacggtacatctaaattaatgttaactgattttcaaaaagagaattataataaatatattcaaggtcagaaacaacgcgtgatatttgaaaatggccattttgtctaattgatagtgaatataattagagtaagaggctgggacataaatccctaaaaaacagcagtaagataattttcaattagaaaatatcttactgctgttctctatttatacaatacttcgtattgaatggcttcgctttcctagggtgccgtctcagcctcggtcttcgactggcactgctccctcaggagtctcgccattaatactacgtattaacatgtaattttactttgaaatactttaaaaaaataagacactttgcccaacttacactaccaataaaaacttctgttagaattcctcaaaatgatatttcgcgacatgttaatgaaattgttgaaacgatacctgatagcaaattcgatgaattcagacatcatcgtggcgcaacatcctatcatccaaagatgatgttaaaaatcatcttatatgcatatactcaatctgtattttctggtcgtagaatagagaaattacttcatgacagtattcgaatgatgtggttagctcaagatcaaacaccttcttataaaactattaatcgttttagagtgaatcctaatactgatgcgttaattgaatctttatttattcagttcgcttatttttcttggatttcttgtatatcattttaaagtgataaagatatttcgaaacataattcttctattatatttaagatttaactgtttttggaatgatcatgtatgcagacaatgagccaaggatcatcaatacaatgctgactataaatgttacggttgcagctacacttggtgcatagtttagttgtaacatactgaaaactgtagtacttagtgctataccaaaggagtcacctaatgtaccactcattttatataatcctgtagctaaaccaactttttcattaggcatactgaaaattgcaatcgtaagtccaggtgttgcgactaaaccattacctatcgcacatatgacgaaaccaatgataactgcaatgacatattgtgatgccaataattgagtcatgctaataatagtgatgccgatgacagggaacaacggaccaatgatgagcatcaatttgccaccgaaacgtaatgttgctttttcacctaaacgaatcatcgcaactgccacaatggcatatggcaatgtaacaagtccagattgcgcagctgataaaccaaggtgtgtttgagcatatatgaaaaagaccactgttacgcctagaccgctatttaaaacaaagttatttaaaaatgcaccaatgaacggacggttgcgtaatactgagaaatcaataaaaggtacttcatgtcgacgttcgatgatgatgaatatcaacgtagtgatgataaaaatgctcagacaaatgattgaaaatgtactaaaccaaccttgttcgaatccttgtgttaacaataatgtaaagctaccaatcataacagcgaaaatcgacatacctttgtaatcgaatggatgacggtggctatgttgacttactttttcaggtgtgccttttagaagcaatatggcaatgaaagcaatgactatactaatgatgaaattcgtttgccatccgaaatttgaggcaattaaaccgccgataacaccagctaggccgatgccaccaacagtactaatcattagataactaatcgctcgtcttaaatgttctcctttaaattgattatttaacacgccaactgttgaaggtaacaagatagctgctgatagaccttgtaaaattctaccgatgatgagcagtgcagtgatgtccgatataattaatagaagagatgcaaacatactgattatgagacccatgtatgtcattctcagttgtcctattttatcagcaatatcacctgcagccaccatgaagatacctgtggcgaaggaagttaaactaatagataaatttaacacggcaggagaggtttgatatgtttgaccaacgagaggtcctatattaataaatgattgtgcaaacaaccaatatgttaatgcagacaacataatcgcaataataatattactgcgtggtgaagattgtgtgttattcacagatgtcactccttgtaaaaattaaatatagaaagtcatgagatgaagtgaacggatgtatagatgatcgttcactcacacataagtcatgatttccttacatatcataccacagttattgagaatgaatatcaattaattgcttgtataattgattttttatagtatgtttaagtgaaacagctttatttgaaagtgattaaagtaaatgaaggtacagaggagtgagaacaatgtgcacaggattcacaatacaaactttaaataatcaagtacttcttggacgcacgatggattatgattatccattagatggttcgccagcagtgacgcctagaaattatcgttggaaatcttgcactggcacgacaggccaaacgcaatatggctttattggcacaggaacagatatggaaggttttatttatggtgatggtgttaatgaacatggcgttgccatttcaacacaatatttccgaggttatagttcatatggatcaacacacaaagcggacgcgatgaatattacgcaaaatgaaattgtgacatggattttgggatatacaacaagcattgaagatatgaaacaacaagcatcccaaatacatgttgtagctgtatatttaaatgacatcggtgaagttccgccattgcattatcatgtttccgatgcaactggacatacagtcgaagtttcatttaaagagggtgaagtggttataaaagataatcctattggtgtcttaacaaatcatccagacttaaattggcattatagtaatttaagacaatatatcaatatttctccttatccagcaacagcaaatttattggaaggtgtaacgattgaacctttaggcaatgaagcaggtacatttggattgccaggtggatttacttcaactgagcgctttgtgagaatggcatttatgaaagcaaacattgctcaaaacaatgataaagaaatggatttaatgaatgcattttatttattagatgcggtaaatataccgattggaattgtacgtccgcatgatgctgacaatcactatacgatgtatcagaccgtaataaatttaactacaagaacgttatatattaagtattatggcagcaatgaattagtagcattaaagctcacagatgatttaattaatagaaaagatatgacgatttttaagcctgagaagcatatcactattagaaagttgaatgacaatcaatagcgattgataatggaatttggttgatatgatttgatggatgattactatcatgcattagcgttgaatcgcgaacatggacgaacgattagttgttaattttgaaaatttataaaaggttaaacgaatgcagtgagagatgtcattttaatatcaatgtatggctattttgtaatgacaatgtaatgagtttagtaaaacatttcgggaatattaaatagttggaaaatgagaattaaatcctttactcagttgtctaattcttttagtatgtgcagtacagtttaattgaaaactaactttaactttaatggaggatgttttatacatgaaaaaattaacagcagcagcgattgcaacgatgggcttcgctacatttacaatggcgcatcaagcagatgcagcagaaacgacaaacacccaacaagcacatacacaaatgtcaacacaatcacaagacgtatcttatggtacttattatacaattgattctaatggggattatcatcacacacctgatggtaactggaatcaagcaatgtttgataataaagaatatagctatacattcgtagatgctcaaggacatacgcattatttttataactgttatccaaaaaatgcaaatgccaatggaagcggccaaacatatgtgaatccagcaacagcaggagataacaatgactacacagcgagtcaaagccaacagcatattaatcaatatggttatcaatcaaatgtaggtccagacgcgagctattattcacatagtaacaacaaccaagcgtataacagccatgatggtaatggaaaggtcaattatcctaatggcacatctaatcaaaatggtggatcagcaagtaaagcgacagctagtggtcatgcgaaagacgcaagctggttaacaagtcgtaaacaactacaaccatatggacaatatcacggtggtggtgcgcattacggtgtcgactatgcaatgcctgaaaattcaccagtttactcattaactgatggtacagtagtacaagcaggttggagtaactatggtggcggcaatcaagtaacgattaaagaagcgaacagtaataactaccaatggtatatgcataataatcgtttaactgtttcagctggtgataaagtcaaagctggtgaccaaattgcatattcaggtagtacgggtaattcaacagcgcctcacgtacacttccaacgtatgtctggtggcatcggtaatcaatatgcagtagacccaacgtcatacttgcaaagtagataatacagaaaatcccaagttgcgatatcatacgcagcttgggattttttcgttttaataataggtataagtccattgtttgtcctctaaaacatgttgataaaaaggatcttggccaattaacttgatatcatctgcaagtgcttcaacttcatctaaatgatgggtagttaatataattaaacatttagatttcatgatgttaagtagttggtggatgtcatgtctagattttaaatcaataccaactgtcggttcatctaaaatgagaattcgaggttgacctagtaaacctactaatatattaattttacgtttattcccaccggacaatgtagatactttggcagacgtatcatcaaagtttaattgctgtaaatattcgttgatagttgtatcgttaattggatttttacaaagtgatttaaaaaatttaatgttttcagccactgtcatgtgttcaaataacgcaatgtcttgtggcacataaccgatgtgattttgtatttgtctttgattccatttttcgccgaaatagttgatagttccatcattagctttttcaataccagcaatcatacgaagtaatgttgattttccagcaccattatcaccaagtaatacggttaaacgattactatcaaaggacatagttaaatgattgaaaatctgtttgttacggtaacgctttgaaaggttattaatttctatcatcagttacgctcctttacatgaaaataatcaagtatacgatacccatagcaagtgcatatataaatgtcatgaataatcgatgacttattgtttgaatatggaataagataaagacgatacctatctcataaatcaatataagtaacagtgattttaagtaaaatattaagctgagtggttgagacaaatatagactaactgccaatagtaccaacaataacaaaatcgtatgtgtcattacataagtactatatagtttgaaacggcttaaatgatattgtgataatcgttgcaatgctgcttgttggtttaaacgataatgaagtactacttgaacagcgctaacaaataaaatcaccgcaaagattaagctaattgaaatagagtgttgtgcttgtttagtaagcgacacaaatttgattttagattcaggtgtatgtttatgataggacttgttgatagcatcgatggattgatgctgtttcatatcctcaaggtgttcataaataatgttaggaatttgctgctcatataatgaactactaacaatttctacagcaataccacctataaagtcatctctaccatataactgtatcgtttcttttaaacggttctcttttaatttttgagagaaacctttaggaatttgcatacttaaaatagcttcctttttagtaacatcatcttcaatatagctttcatcttcatcgacttttttaatagttacatagtcagattgtttaattttattgacgaatgattttgatgcagtggtttggtctaaatcttgaatggtaatcggtattttgaagttgtcatgtgctacacggtaaccgataccaataagtacgagtgcgatgacaatggttgttacgagcaagatgtattgtaaccattgcttgaacacaacaagttgtatataaggcttcattgacgatacctccaaaccaatacagctaaattaattatcaaaagtgcgatgaagctaagatagaaactagggtgcagttctaaaatgtagttgtttaaaataatttctaacaattgatttgttacaactgcgaacggttgaatattgaaaacaccatttgctatatgttgtaaaaaaatcgtaggtattgttaaaccagataacaccaggatgacaatagctaatatgactttactaatactattcaacaagcctgttgttaaaagttcgatgagtaataaccacagtattaaaaaggtaacataatagcttaaatgaatggctaacgttggccaattatataattcaaagatattcggaatactgaacacaatccaaactacaccaacgatactccataacatagtataaaaccatgtaatcaacgtacgaatgattaataaacgctctttagaaaaatgaaacattttcaatcgcgctttcaatacagtatcttgattcattttcaaaactgtaaataaagatagtgcaaagatgaataccgttgttaaaaatcctgtaattgcataataactgcccgtatcgtataaatgaatcggttctaagttaaatgcacctgaacggtttaatcctgtaatcagcaaatcagtcataacattgatactgtcagaatgtgatgctttcggtgctaagtcttgaaaagctaagatgccacccattgatcgcataagacgttggtaaacagaatctgttagctgagatagcacgacacttttcatggattgttgatcatatgtatatactgaaattggtagttcgccttgtttataaaatgccttggtcatacctttatcaaaaacaaaatagccttgaagtttatgtttttttaacaaagtatgtgcttgcttatcatcatatgctttaatgctcacgttttttcctaggttactccctttaccaatagagtttaagattaatttcgtttcacttgattgatctttatctacgacacctatattaaaatgattgtcatcttctgttacatgttggattgtcgttaatgtaataaggagtgccgctaatataaatagtaaatagataatcaaataccactttttcaataaaaaagagtggtagatgcgaaacaaatgtattgttttcatttaaccactcctccaatgataagattgaaaggcaagatgaccttccaatcttatttttatattttagttatttagatgccttttttaaaattgattcaaacattttgccgccatttttttcgatttctttttcaagtttttcacggtcttttgaagatagactattgaaatcttttgcaccactatcatcaaaatcaatatctgctttcaattttgtgctagattttaaaatgaaattaattggttcttcagcatatttgatgccgatatttaacgtagatttctgagtgttattttttacgtcagaatctatattattttcaaaagtgaattcattttcgtcgctatatttatctaatgcgacagtgattttacctttatcttgacgttttgtgccatctactttttcttggttatctaatttgatttttgattcatcatattctgtctttttaccaaattcgtatttatcattatatttattatctttttctttagaagatacgcctttaattgtatatttcgcttcagcatacgtgtatttatcttgatcgaaatcaagtgcgtaatctagttttaacttatcgtcttctaaagtattagtacctttgattttagttttattattttctttgtctgtaatagtaatttctcgttttacaatcgtatgtttttcggtataaattttagattgaattttagcaaattcatcctttttagtttctttgacatcgtcaattgcttttttgatgtctttttcaaagtcttttgtagcaccttgttcttccattaattttttaaggtctttatcctttttagcttcttctaatacagctaatgtaatttttttagtgtcagctctgctaagtgttaacgtgacaggtctaactttgtacttttcaccattaaccttaatttcttcttttttacctttatcaaaattatcgtcatctaatttgtcgacaataagttcggaatatttttcggcaattttgctgtagtcactttgttgtgcttgagcattattaaaaagagtatttaaatttagttgttggtttgtaataccattttcttttgctgtttcttcatcttcacctgtaagttttgaataagttgataataaatcagaattattaacactatatttccctttaaataatggtgattcgaaataatgcttatctttatctgcagctaactggaatttccctaatgcagagtctgcgattgttggttcaagattaatcattgatttctcttttttaggatcatgtccatatgacattttaattttcgatgcattaacaacagatttaggaatgccaagccctttaacaatttcatctgatgcatctgcgcttaattctaatgaagataaaaacgaattatctttcatcttttcttggaacttcacttcattttcaaaacggtcattaaaataatctttatacatttttgctgtttgttgttcactttttaggtatgtatttttcggtgtattagcaaaaaatgcataaactccccatgcgattccacctattaatagtaagacaataataataggaattataatttttaactttttagacattttgcttcctcccaattatttatgagttaatcatatcagaacaatacattttattaaatggtttattttaaattttgtttaaattaatagaattttagttataataatgtttaataagttattggaaatctaataaactacaaaaaatagtttgattacataatgattcttgaaaaatgttggttaacttaataatatgcatttttttggcgaagaagatttatttaacttataaaaatattgaagtaagattggggagattatgaatttatggaattgaaagtcgatgattttgtaaagaatataaaaagaccatacttgactgtattgggagtatttgtagttgcagtttcattattttttgacgcgattatgtttttctacgctaaactatatgataaattgcctatgtatttactggtgtttatggcctttacagctgtaattttgattatgatgtacatacaagagaaaaatgaaaattacaaagttgaaaaaagatatgtggttagatatctcacacttaacgttattgtgggatatactttgccattgctttttgtatctatttacgtttttggtgtagtcggttttggatttgatgttttcaattattgtctaggtattatcttgatgttatttatttcttggttaggtttatttttattttataaaaacgaatttgatagtgaaaatcctaatcctgcagttaatgccatagcaattattataaaattatttgcttttggaggaatattttatataagtctaatagttcctgtaacacagcaagaagagatttttatagggttaagtatattcatcaatataattgttgatgctcttcttgttaggtcatattttaattacgcgttatataagagtattaagaaagatatcgaaaatgaaggtaagacaatgtaaaggaaagacataaaaaataataggagtctaaccatgataatttttattttaataacaatatttgctatttattatatagctatgattgctagtttgtttaaaagtgaaggtttttcaataataggtttaatattagatgttgttataatggggacattgattttttactattttataggcgctcgctttgttgatcatgatttaagcaactttttaatgtttatggatactggatcatatatttttatgtactttgcaattaagtgtttatgggtgaaacctaaggtagtaaattatttgattgcaaaagaattgggtgaatctaaagaggtcattgaagagcaggaattagatttacagacatcaaagataagaggtatctactttttcattatttcagtagtgatgttaattatcactaaattaagaatgcaacctgagttacaggcagatgctatatcgatgaatcctgtatttatttttgttggtgttataatcattttaatttggctagtactggatatatatcgcaagaaaaaatacggtatattcttattcaagacgatagtgccactagttgttacgacttggattattatagctacaattatactttcgtaaacgattttgattaatggggaatgtagagaacatttctttgtaattttataatcgaataacatacaaaataaagcgaccaattttgcagtgttacgaattgtaaactgcgaactggtcgctttttattgatgtcatgattaatttaatggatgtaattatatgatgaaacttctgaagcagagatggttcttgatgaaacgatatattcaccaatccagttcatttctgaaattagaatacttccatcaatattaactttttcaacgtaggctacatgaccaaatggaccatttactgtttgtaaaattgatcctcgtgttgggtgtctatctactttgaagccattgcttgaagcttggcctgcccagtttttagcatctccccaaaatgtactaatcgtgtgtccatctttggcacgtttatcaaagacataccatgtacattgtccagcagtatataagttgttcttacttgtgataagaggctgatcaatgattttaccgttacctaatgctaaaggtttaccgtcagcggtctttgctttgtcattaaattcggcgatttgtaattcgtcatacaattcgtctaaatcgatgcctgtaataagccctttgttatcttttgaaaaagcgttatttaattcatcgtcattgtcttcgacattcggtattgctggtgtcaaaggattgcttggtgacgtttgaggcggtgtgtgtgaatcaattgcgtcattaatgtgcgtatactgaccacttaatgaagaatggtactgattgttgttaagatcacgttgatttgcgtgttgatgattgtcgtttgtacgtgactggttttgatgattgttgtttggcgtgttgtttttgtcatatgtataagtatacgcgccggtgtctttattcactttgaactgtgcgtttgggtgtgctttctttgcttcttctaatgttttgctatcattcgtatatgcttgagccgagttaggcgacatactaaataaagtaagagttgtcatcgtcagtaaaattgttttcttcataataaccatttaatcctttatgtatttaatttaattttagtatacacatttatattacaaaaatgaatggttaattaaaaatatatggttatattcaatatatttattttaaaaaagctaaaaatacttaaaaaactatatacatatactaataatttatatattatttgagtaaggagcactttttcaaaaaatagtgtccctaaaaagttttgataaacttaaaatattcaggaggtttctagttatggcaatgattaagatgagtccagaggaaatcagagcaaaatcgcaatcttacgggcaaggttcagaccaaatccgtcaaattttatctgatttaacacgtgcacaaggtgaaattgcagcgaactgggaaggtcaagctttcagccgtttcgaagagcaattccaacaacttagtcctaaagtagaaaaatttgcacaattattagaagaaattaaacaacaattgaatagcactgctgatgccgttcaagaacaagaccaacaactttctaataatttcggtttgcaataagcattctgaaattggcaaagtcacattttctaatgtggctttgcttatcatttttttaagaaaacaactgaaaggaaataagcatgaaaaagaaaaattggatttatgcattaattgtcactttaattattataattgccatagttagtatgatattttttgttcaaacaaaatatggagatcaatcagaaaaaggatcccaaagtgtaagtaataaaaataataaaatacatatcgcaattgttaacgaggatcaaccaacgacatataacggtaaaaaagttgagctgggtcaagcatttattaaaaggttagcaaatgagaaaaactataaatttgaaacagtaacaagaaacgttgctgagtctggtttgaaaaatggtggataccaagtcatgattgttatcccagaaaacttttcaaaattggcaatgcaattagacgctaaaacaccatcgaaaatatcgctacagtataaaacagctgtaggacaaaaagaagaagtagctaaaaacacagaaaaagttgtaagtaatgtacttaacgactttaacaaaaacttagtcgaaatttatttaacaagcatcattgataatttacataatgcacaaaaaaatgttggcgctattatgacgcgtgaacatggtgtgaatagtaaattctcgaattacttattaaatccaattaacgacttcccggaattatttacagatacgcttgtaaattcaatttctgcaaacaaagacattacaaaatggttccaaacatacaataaatcattattgagtgcgaattcagatacgttcagagtgaacacagattataatgtttcgactttaattgaaaaacaaaattcattatttgacgagcacaatacagcgatggataaaatgttacaagattataaatcgcaaaaagatagcgtggaacttgataactatatcaatgcattaaaacagatggacagccaaattgatcaacaatcaagtatgcaagatacaggtaaagaagaatataaacaaactgttaaagaaaacttagataaattaagagaaatcattcaatcacaagagtcaccattttcaaaaggtatgattgaagactatcgtaagcaattaacagaatcactgcaagatgagcttgcaaataacaaagacttacaagatgcgctaaatagcattaaaatgaacaatgctcaattcgctgaaaacttagagaaacaacttcatgatgatattgtcaaagaacctgatacagatacaacatttatctataacatgtctaaacaagactttatagctgcaggtttaaatgaggatgaagctaataaatacgaagcaattgtcaaagaagcaaaacgttataaaaatgaatataatttgaaaaaaccgttagcagaacacattaatttaacagattacgataaccaagttgcgcaagacacaagtagtttgattaatgatggtgtcaaagtgcaacgtactgaaacgattaaaagtaatgatattaatcaattaactgttgcaacagatcctcattttaattttgaaggcgacattaaaattaatggtaaaaaatatgacattaaggatcaaagtgttcaactcgatacatctaacaaggaatataaagttgaagtcaatggcgttgctaaattgaaaaaggatgctgagaaagatttcttaaaagataaaacaatgcatttacaattgttatttggacaagcaaatcgtcaagatgaaccaaatgataagaaagcaacgagtgttgtggatgtaacattgaatcataaccttgatggtcgcttatcgaaagatgcattaagccagcaattgagtgcattatctaggtttgatgcgcattataaaatgtacacagatacaaaaggcagagaagataaaccattcgacaacaaacgtttaattgatatgatggttgaccaagttatcaatgacatggaaagtttcaaagacgataaagtagctgtgttacatcaaattgattcaatggaagaaaactcagacaaactgattgatgacattttaaataacaaaaagaatacaacaaaaaataaagaagatatttccaagctgattgatcagttagaaaacgttaaaaagacttttgctgaagagccacaagaaccaaaaattgataaaggcaaaaatgatgaatttaatacgatgtcttcaaatttagataaagaaattagtagaatttctgaaaagagtacgcaattgctatcagatacacaagaatcaaaatcaattgcagattctgttagtggccaattaaatcaagtcgacaataatgtgaataagctacatgcgacaggtcgagcattaggcgtaagagctaacgatttgaatcgtcaaatggctaaaaacgataaagataatgagttgttcgctaaagaatttaaaaaagtattacaaaattctaaagatggcgacagacaaaaccaagcattaaaagcatttatgagtaatccggttcaaaagaaaaacttagaaaatgttttagctaataatggtaatacagacgtgatttcaccgacattattcgtattattgatgtatttactatcaatgattacagcatatattttctatagttatgaacgtgccaaaggacaaatgaatttcattaaagatgattatagtagtaaaaaccatctttggaataatgtcattacgtcaggtgttattggtacaactggtttggtagaagggttaattgtcggtttaattgcaatgaataagttccatgtattagctggctatagagcgaaattcatcttaatggtgattttaactatgatggtcttcgtacttattaatacgtatttactaagacaggtaaaatctatcggtatgttcttaatgattgctgcattgggtctatactttgtagctatgaataatttgaaagcagctggacaaggtgtgactaataaaatttcaccattgtcttatatcgataacatgttcttcaattatttaaatgcagagcatcctataggcttggtgctagtaatattaacagtacttgtgattattggctttgtactgaacatgtttataaaacactttaagaaagagagattaatctaatgttgatgaatagcgtgattgctttaacttttttaacagcatctagcaataatggcggacttaatattgatgtgcaacaagaagaggaaaagcgaatcaataatgatttaaatcaatatgatacaacgctatttaataaagacagcaaagcggttaatgatgcgattgctaagcagaaaaaagaacgacaacaacaaataaaaaatgatatgtttcaaaatcaagcgagtcactcgactcgcttgaatgaaactaaaaaagtgttattttccaaatctaacttagaaaagacttcggagagtgataaaagcccctatattcaaaacaagcaggagaaaaaaatattcccgtacattttgatgtctgtaggggcttttttgactttaggatttgtcattttttcaattcataaagggagacgaacgaaaaatgaatcagcacgtaaaagtaacatttgattttactaattataattacggcacatatgacttagcagtaccagcatatttaccgataaaaaacttaatagctttagtattggatagtttggacatttcaatatttgatgtcaatacacaaattaaagtgatgacgaaaggtcaattacttgttgaaaatgatcgactcattgattatcaaatcgctgatggagatattttgaagttactataggaggaaaaatagatggttaaaaatcataaccctaaaaatgaaatgcaagatatgttaacgcctttagatgctgaagaagcagctaaaacaaaattacgcttagatatgagagagattcctaagtcttcaattaaaccagaacattttcatttaatgtacttattagaacaacattctccatattttatagatgctgaattaactgaactacgtgacagtttccaaatacattatgacattaatgacaatcatacaccttttgataatattaaatcatttactaaaaatgaaaaattacgttacttactcaatatcaaaaatttagaagaagtaaatcgtacacgctacacatttgtgttggcaccagatgaattatttttcacaagagatggattacccattgctaaaacaagagggttacaaaatgttgttgatccattacctgtgtcagaagctgaatttttaacaagatataaagcgctggttatctgtgcattcaatgagaaacaatcatttgatgctttagttgaaggaaacttagaactacataaaggaacgccatttgaaactaaagttattgaagcggcaacgttagatttactaacggcatttttagatgaacagtatcagaaacaagaacaagattatagtcaaaattatgcatatgtacgcaaagtaggacataccgttttcaaatgggttgctatcggtatgacaacgttaagtgttttattaattgcattcttagcctttttatatttttcagtaatgaagcataatgagcgcattgaaaaaggataccaagcatttgtaaaggatgattatacgcaagtactaaatacgtatgatgatttagatggtaaaaaattagataaagaggcactttacatttatgccaaaagttatatccaaacaaataaacaaggtttagaaaaagataagaaagaaaatttacttaataatgtgacaccaaattcaaacaaagactacttattatattggatggaattaggacaaggacatcttgatgaagcgattaatattgccacttatttagatgataacgatattacaaagttagcgttgattaataaattaaatgagattaaaaataacggagatttatcgaatgataaacgttctgaagaaacgaaaaagtataacgataaattgcaagatattttagacaaagaaaaacaagttaaagatgaaaaagcgaaatctgaagaagagaaagcaaaagcgaaagatgagaaattaaagcaacaagaagagaacgaaaagaaacaaaaagaacaagcacaaaaagataaagaaaaacgccaagaagctgaaagaaaaaaatagtataggactgaggcaaagacaatgcataaattgattataaaatataacaaacaattgaagatgctcaatttgcgagatggtaagacatatactattagcgaagacgagcgtgcagatattacgttgaaatcgttaggcgaagtcattcatttagaacaaaataatcaaggtacttgacaagcgaatcatacttctattaataaggtgcttgttagaaaaggtgaccttgatgacattacattacagctttatacagaagctgattatgcatcatttgcgtatccttcaattcaagatacgatgacaattggaccaaatgcgtatgatgatatggttattcaaagcttgatgaatgccatcattattaaagattttcaatcaatacaagaatcacaatacgtacgcattgtgcacgataaaaatacagatgtgtatattaactatgaactacaagagcaactaacgaacaaagcttacattggtgatcatatttatgttgaagggatatggctcgaagtacaagctgatggtttaaatgtattgagtcagaatacagtggcatcgtcattaattcgcttaacacaagagatgccacatgcacaggcagatgattacaatacgtaccatcgttcgccaaggattattcaccgtgaaccgacggatgatattaagattgaaagaccgccacagccaatacagaagaacaatacagtgatatggcgttccattataccgccattagtaatgattgctttaactgttgtcatctttttagtgagaccaattggtatttatattttaatgatgattggtatgagtacagtaacgatagtatttggtattacaacgtatttctctgaaaagaaaaagtataacaaagatgttgaaaaacgagagaaagattacaaagcttatttggataataaatctaaagaaattaataaagcgattaaagcacaacgttttagtttgaattaccattatccaacggttgctgaaattaaagatatcgttgaaacgaaagcaccaagaatatatgaaaaaacatcgcatcatcacgatttcttacattataagttaggtattgcgaatgtagaaaagtcattcaaattagattaccaagaagaagaatttaaccaacgtcgtgatgaactattcgacgatgctaaagaattgtatgaattttacacagatgtagaacaagcaccattaatcaatgatttaaatcatgggccaattgcatatattggtgcacgacatctcattttagaagaattggagaaaatgctaattcaattgtcaacattccatagttatcatgatttagagtttctatttgtgacacgtgaagatgaagttgaaacattgaaatgggcacgttggttgccacatatgacattgagagggcaaaacattagaggatttgtttacaatcaacgaacgcgtgaccaaattttaacgtcaatttatagcatgattaaagaacgtatccaagctgtgcgtgaacgcagcagaagtaatgagcaaattattttcacaccgcaattagtgtttgtcattacagatatgtcattaattattgatcatgtcattttagaatatgtaaaccaagatttatcagaatatggtatttcattaatctttgttgaagatgtgattgaaagtttgccagagcatgtagataccattattgatatcaagtctcgtactgaaggcgaactgattacgaaagaaaaagaattagttcaattgaaatttacacctgaaaatattgataacgtcgataaagaatatatcgcgcgacgtttggcgaatttgatacacgtcgaacatttgaaaaatgcaattcctgatagtattacatttttagagatgtataacgtgaaagaagtagatcagcttgatgtggttaatcgatggagacaaaacgaaacatacaaaacgatggcagtacctttaggtgtaagaggtaaagatgatattttatcattgaacttacatgaaaaagcacacgggccacatggtttagttgctggtaccactggttcagggaaatctgagattatccaatcatacattttatctttagctattaattttcaccctcatgaagttgcattcctattgattgactataaaggtgggggtatggcgaacttatttaaagatttagtccatttagttggtacgattacaaatttagatggcgatgaagcgatgcgtgccttaacatcaatcaaagccgaattgagaaaacgtcaacgtttattcggagagcatgatgttaaccatattaatcaataccataagttatttaaagaaggtattgcgacagaaccaatgccacatttattcattatttccgatgagtttgccgaattaaaatcagaacaacctgattttatgaaagaacttgtatcaacggcacgtattggacgttcgttaggtattcatttaatacttgcgacacaaaaaccatcgggtgttgttgatgaccaaatttggtctaactctaaatttaagttggcattaaaagtacaagatagacaagacagtaatgaaattttaaaaacaccagatgcagcagacattacattaccaggtcgtgcgtatttacaagttggtaataatgaaatttatgaattattccaatctgcatggagtggtgcaacatatgacatcgaaggcgataaattagaagttgaagataagacgatttacatgattaatgactatggtcaacttcaagcaatcaacaaagacttgagtggacttgaagatgaagaaacgaaagaaaatcaaactgagttagaagcggtcatagatcatatcgaatctattacaacacgattagaaatcgaagaagttaagcgtccatggctaccaccattgccagaaaatgtatatcaagaagatttagtagaaacagatttcagaaaattatggtcagatgatgcaaaagaagtggaattaacattaggacttaaagacgtaccagaagaacaatatcaaggaccgatggtattgcaattgaaaaaagctgggcacatcgcgttaatcggaagtccaggatatggtagaacaacgttcttacacaacattattttcgatgttgcaagacaccatcgtcctgatcaagcacacatgtacttgttcgatttcggtaccaatggtttgatgccagttacagacataccacatgtcgctgattactttacagtagatcaagaagacaagattgctaaggcgatacgtatatttaatgatgaaattgatcgtcgtaagaagattttaagtcagtatcgtgtcactagtatttctgaatatcgaaaattaactggtgaaacaattccgcatgtctttattcttattgataactttgacgcagtaaaagattcacctttccaagaagtttttgaaaatatgatgattaaaatgacgcgtgaagggctagcattagacatgcaagtaaccttaactgcttcaagagctaacgctatgaaaacaccaatgtacattaatatgaaaacgcgtatcgcaatgtttttatatgataaatcagaggtgtcgaacgtagtaggacagcaaaaatttgcggttaaagatgttgtgggtcgagcattgttaagtagtgatgacaacgtatcattccatattggccaaccatttaaacatgatgagaccaaatcatataatgatcaaattaatgatgaagtatcggcgatgacagaattttataaaggtgaaacaccaaatgatattcctatgatgccagatgaaattaaatatgaagattacagagaatcattaaacttaccagatatagttgcaaatggtgctttaccaattggattagattatgaaggtgttacactacaaaaaattaaattaactgaaccagcaatgatttcatcagaaaatccgagagaaattgcgcatattgctgaaattatgatgaaagaaattgacatattaaatgaaaaatatgcgatttgtatcgcagactcaagtggagagtttaaagcttataggcatcaagtggctaactttgccgaagaaagagaagacattaaagcgattcatcaactaatgattgaagacttaaagcaaagagaaatggacggcccatttgaaaaagattcactttatattatcaatgattttaaaacatttattgattgcacgtatattccggaagatgatgttaaaaagcttattacaaaaggaccagaacttggcttgaacattttatttgtcggcattcataaagaattaatagatgcttatgataaacagattgatgttgcacgtaaaatgattaaccaatttagtataggtattcgtatttcagaccaacaattctttaaatttagatttattcaacgagaacctgttattaaagaaaatgaagcatatatggtcgcaaaccaagcttatcaaaagattagatggtttaaatagcaatgaattaaataggagggaggtatgttatgaattttaatgatattgaaacaatggttaagtcgaaatttaaagatattaaaaagcatgctgaagagattgcgcatgaaattgaagttcgttctggatatttaagaaaagctgaacaatataagcgattagaatttaatttgagttttgcactagatgatattgaaagcacagcaaaggacgtacaaactgcaaaatctagtgctaataaggacagtgtaactgttaagggaaaggcgcccaatacgttatatattgaaaaaagaaatttgatgaaacaaaagcttgaaatgttgggtgaagatatcgataaaaataaagaatccctccaaaaagctaaggaaattgctggcgaaaaggcaagtgaatattttaataaagcaatgaattaatattgaggtgaagatatgggtggatataaaggtattaaagcagatggtggcaaggttgatcaagcgaaacaattagcggcaaaaacagctaaagatattgaagcatgtcaaaagcaaacgcaacagctcgctgagtatatcgaaggtagtgattgggaaggacagttcgccaataaggtgaaagatgtgttactcattatggcaaagtttcaagaagaattagtacaaccgatggctgaccatcaaaaagcaattgataacttaagtcaaaatctagcgaaatacgatacattatcaattaagcaagggcttgatagggtgaacccatgatgaaagatgttaagcgaatagattatttttcttacgaagaattaacaattttaggtggtagtaaattgcctctcgtaaattttgaattgtttgatccatcaaattttgaagaagctaaagctgctttaattgaaaaggaattagtaacagagaatgacaagttaactgatgcaggttttaaagtggctacattagtcagagagtatattagcgccattgtaaatattcgaattaatgatatgtattttgcaccatttagctatgaaaaagatgaatatattttgttaagccggtttaaaaataatgggtttcaaatacgaattatcaataaagacattgcatggtggtcgattgtacaatcatatcctttattgatgagacaagaaaagtccaatgattgggactttaaacaaattgacgatgaaacattggagaacttaaataatgaaagtatcgatacgattgggcgtgttttagaaattgaaatatacaatcatcaaggtgaccctcaacaaagtttatataacatttatgaacaaaatgatttgttattcattcgatacccattaaaagataaagtgctgaatgttcatattggtgtcattaatacatttatacgagaattatttggattcgatactgatgaaaatcatattaataaagcagaggagtaatgacgttgagtggaaaaattagtgttaaagctgaaacgattgcacatgttgtaaaagaattggaaagcataagtcaaaagtatgatgaaatagctcaaaactttggaaaaatagcgcaattaaattactacagtagtgaaaaagctgcacattctatggaaaatggctatagtagtgctgcaacagtcattagtggtctcaaaggtccattgagtacactcggtggtggcgtcatgaattcagcacaaaagttctttgaagcagatgaacattggggtacggaatttgccaagctttactataatattgagggataggtgcatgacatgacaaaagatattgaatatctaacagctgattatgacaatgaaaagtcatctatccaaagtgtaatagatgcaatagagggtcaagacttcttagatgtagatacaacaatggatgatgcggtaagcgatgtcagttctttagacgaagatggcgcaatatcattaacaagtagtgtagtaggtccacaaggatctaaattaatggggtattatcaaaatgagttatatgattatgcatctcaattagattcgaaaatgaaagaaattattgacacgccatttatagaagatatagataaagcattcaaaggtataacgaatgttaaattggaaaatatactaattaaaaatggtggtggacatggtagagatacctatggggcttctgggaaaattgcaaagggagatgccaagaaaagtgacagcgatgtttatagcatcgatgaaatattaaaatcggatcaagaatttgtaaaagtaattgatcagcattacaaagaaatgaaaaaagaagataagaaattatctaaaagtgattttgaaaaaatgatgactcagggcgcttcttgtgattacatgacagtagctgaagcggaagagctagaggagcaaaagaaaaaagaagaagctatagagattgcagcactagctggtatggtagttttatcttgtattaatcctgttgctggagcagtagctattggtgcttattccgcttattcagcagcaaatgcagccacaggaaaaaatattgtaactggaagaaagctatctaaagaagaacgaatcatggaaggactttcgcttattccattgccaggtatgggcttcctcaaaggtgctgggaaaagtttaatgaaattaggcttcaaaggcggagaaaaatttgcagttaaaacaggattgcaaaagacaatgcaacaagcagttagtcgtatttcacctaaaatgggaatgatgaaaaacagtgtgttgaatcaatctcgtaactttgctcaaaatactcatgttggacaaatgctgagtaacatgcgtggtcaagcaactcatactgttcaacaaagtagaaattggattggacaacaagcacaaaatgtcaaacgaatagtgaataatggacttgataaagaaatagcacatccatttaaacaacaacttgcaccagcgggaatgggtggtataaaatttgctgaaacaactactttgagaaacatgggtcaaaacataaagcgtgctgttacaccacaaaatcacgtgacacatggtccaaaagatagtatggtgagaagtgaaggcaaacatagtataagtagccatgaaatgaattcatcaaagtatgttgaatcaccaaactacaccaaggttgaattcggagaacactatgcaagacttagacctaagaaactaaaggcgaatattgaatacacaacacctactggtcacatatatcgaaccgatcataaaggtcgcataaaagaagtttatgtagacaatctctctctaaaagatggggatcgtaatagccatgcacaaagaactgtggggggagaggatagattaccagacgatgatggaggtcacttaatcgctagaatgtttggtggttcaaaagacattgataaccttgtggcacaaagtaaatttatcaaccgtccatttaaggagaaaggtcattggtataatcttgagaaagagtggcaagagttcttaaactctgggaaagaggtgaaaaatattaaaatggaagtaaaatatagcggtaatagtcaaagaccgactatatttaaagttgaatatgaaattaatggtgaaagaaatattagaagaatattaaataagtagaggtgccaacatgacatttgaagagaagcttagcaaaatatacaatgaaattgcgaatgagattagcagtatgataccggtagagtgggaaaaagtatatacaatggcttatatagatgatggaggaggtgaagtattctttaattatactaaaccaggtagtgatgacttgaattattacaccaatatacctaaggagtataacatttctgtgcaagtatttgatgatttatggatggatttatatgatttatttgaggagttaagagatttatttaaagaagaagatttagaaccatggacatcatgcgaatttgattttacaagagaaggtgaattaaaagtttcatttgattatattgattggataaattcagaatttggtcaaataggtcgacaaaattactataagtatagaaaatttggaattttaccagaaacggaatatgaaattaataaagttaaagaaatcgagcaatatattaaagagctagaagaataaactatcttaatgtaagactaaacaataaagctttgtttagtctttttagcgtttaagtaaaaagcaatagataccgtaaagttgatgctcatcaaataataatataaagataattttaggtttttaaacttttaatcgaaaagaatctaagtttatagctttaaatacgtaatatgctatttaaaaaataatgtataggagatagatatgactactaaagaaaatattgatactcttcgaaagccaggtgcacaagccttaagtttagcatcattatttatgatacttttttcatgtctaactttcttttttggtttagattatgaaaggtttccaaattatttaaagataacgacaattatagaattaataattatcataattagtttacttcaatggattagatttatagatttcgaaaaggaaagcgcacagaaatataagaaaatatatgcccgatttttagttattataaatgtgctaactactatcaccgcagtatttgcaacatgtaacctttattattttgttgctgtacaaaatcattatgacctattcaattattggttgatgggtacgatttcaatcataattagttatttgttattagtaattggcggaatgttcacgttattaaaattacctaaagtaacaaaacgttggggtggtaaaactaaaacacatttcggtttattattaactgcgttgagctcatttatatatattgaaaaaattatcgaatatatattggttcctaatgtcgtagaatctaagtttataattattgtgagcatgttggttatcgctggagcacaatttgtggcatttcaatttattatgcaatacagtagattctatatttttgaattaaacactgaagatgatgactaaacaattttataaattctgtgaagtatacttatatataagataatcaacttcaacgtatatcaccatattattttatactcaatgatgtgaatggatttaagtggattgatattaaagtaaaagttatggaatattgaggtgtgaatatggagttcttattattaattgtcgtagccggactgtattatattatatatttaactgctgtgatgtattctgaaaaaatagtagtattgcctataatcatctatgccattgtgtttgtaataattggtatcacttatatctttataggcgacagctatgatcaattaacaaatttcaatgtgattttgtatatggggagtttgttttatgcatggatggctattagaaatctttggaacagaccactattactaaaatataagaacattacagatagttcaagtggaatagttaataaatctgaatacaattcagttgaaagcttacgtataaatattgaaatagctaagtataaagggattatttctttgatagtagctatagtactaacggtattaatgacattaaagtcaacacctcaaatcactgcagaaacacgtgacttaagtatctcatttttcatactcagcttatttatcattattatatttgcagtttgggatttgtttattagagttagaaaaggagcgtttgcttttgttgtaataaggccaatattatttagttgttggttatttattttgaatatgattttatcaagattattataattgtattacatataggtgtgggtaaatttttatttatgaaatgataaaaaagtatatactattaatatcttttttactataattataaatagttaaataaattgaaagacaaaataatgagtaggagttaatgagatggaaaaccaaaaacaaggcaatggcttaaaaattgcaacatgggtatttattgtattaacagtagttacaccgctatttggtattggaagtattgtttgtagtattaattataaaaaatacgatgctgaaaaaggttcgaagttattgcaaattgcaattatcgtaacaataattgcttttgttttaaatttattagcatatttaggtttaagataagtaaaacgaatttgaagaagcattaagcgacatttgggtgttgtttaatgctttttatttaacggaaataagtgtagagaataaattaatagtttaatcaagagatatttcgaacacataggggcgataacatgactttcgaagaaaaattaagtgaaatgtatagcgagattgcgaataagattagcagcatgataccggtagagtgggagcaagtatatgcaatggcatatgtaactgatcaagctggagaagtcatctttaattatactaaaccagatagtgatgaattaaattattattcagacatacctaaagattgcaatgtctcaaaagatatttttaagaattcatggtttaaagtttatcgaatgtttgatgagttaagagaaacttttaaagaagaagggcttgaaccatggacatcatgcgaatttgactttacaagagatggcaaattgaatgtatcttttgattatatagattggataaatacagagtttgatcaattgggccgtcaaaattattatatgtacaaaaaatttggggttataccagaaatggaatatgaaatggaagaagttaaagaaatcgaacaatatattaaagagcaagaagaagctgaacaatagaggtgataacatgactttcgaagagaaaataagcaaattatataatgagattgcgaatgagattagcagtatgataccggtagagtgggaaaaagtatatacaatggcttatatagatgatggaggaggtgaagtattctttaattatactaaaccaggtagtgatgacttgaattattacaccgatatacctaaggagtataacatctctgtgcaagtatttgatgatttatggatggatttatatgatttgtttgaggaattaagagatttatttaaagaagaagggcttgaaccatggacatcatgtgaatttgactttacaagcgaaggtaaattaaaagtttcatttgattatatagattggataaatacagagtttgatcaattaggccgtgaaaattattatatgtataaaaaatttggggttttaccagaaatggaatatgaaatggaagaaattaaagaaatcgatcaatatattaaagagcaagatgaagctgaaatataggggagataacatgactttcgaagagaaaataagcaaattatataatgagattgcgaatgagattagcagtatgataccggtagagtgggaaaaagtatatacaatggcttatatagatgatggaggaggtgaagtattctttaattatactaaaccaggaagtgaagatttgaattattataccgatatacctaaggagtataatgtttctgtgcaagtatttgatgatttatggatggatttatatgatttgtttaagaatttaagaaatttatttaaagaagaaggacttgaaccatggacatcatgtgaatttgactttacaagagacggcaaattgaatgtttcatttgattatattgattgggcgaattcagagtttggacaaatgggaagagaacattattacatgtataaaaaatttggaatttggcctgaaaaagaatatgccataaattgggtaaaaaaataaaagattatgttaaagagcaagatgaagctgaactataggggcgataatatgactttcgaagaaaaactaagtcaaatgtacaatgaaattgcaaatgaaatcagtggaatgataccagttgaatgggaaaatatatatacaattgcctatgtaactgatcaaggtggagaggtcatttttaattatactaaaccaggtagcgatgaattgaattattacacatatatccctagagagtataatgtctctgaaaaagtattttatgatttgtggacggatttatatagattgtttaagaagttaagagaaacttttaaagaagaagggcttgaaccatggacatcaagtgaatttgactttacaagcgaaggtaaattaaaagtttcatttgattatattgattggataaatacagagtttgatcaattaggccgtgaaaactattatatgtataaaaagtttggtgttttaccagaaatggaatacgaaatggaagaagttaaagaaatcgagcaatatattaaagagcaagatgaagctgaactataggggcgataacatgactttcgaagaaaagctaagtcaaatgtacaatgaaattgcaaatgaaatcagtggaatgataccagtagaatgggaaaaagtatatacaattgcctacgtagatgatgaaggtggagaggttgtttttaattatactaaaccaggaagtgaagatttgaattattattcagatattcctaaagattgcaatgtctcaaaagatatttttaagaattcatggtttaaagtttatcgaatgtttgatgagttaagagaaacttttaaaaaagaagatttagaaccgtggacatcatgtgaatttgactttacaagaaagggaaatttaaaagtatcatttgattatatagattggattaaattaggttttggcccatcaggaaaggaaaactactatatgtacaaaaaatttggtattttaccagatatggaatatgaaatggaagaaattcgagcagtagagaagtatgttaaagagcaagagtagcagacatgttataaaagactgtgcaaaatcaccctcgttttacatttgattcaaagaagaaggtaaaagataagattatttgcaacttaaaaagtcaattagcttatcggtatccatacatcatggataaatgagttcaactaattaacaaatcacgatataaatttaaaattgtcattaattgaaaaggttattgtagtgtattttataaagttgatgtacatcgacttattttttaaaacttatatcaaaaaaatatgagaaaagtatatactattaaaatgttttttactataattataaatagttaaatatttgggaattaaataaatatataggaggcaatttttagagatacatagcaatgtaaaggtatcaaatagttatttcataatttattatgatgacataattttcagtagatagttgtaaattaacactgaaatagatgtttatattaagaagactttaatatcataattaatcaaaatcttgcgtcaaacatttaaacgaattttaagttgataacaattggcaaaacattgttcaaacatcacaatgataaagcatattatcagtattgtagtgtgtggaaaatgacagccatctaaggagaaaaatgatgaaaagaatattggtagtatttttaatgttagcaattatattggcaggttgttctaataaaggtgaaaagtatcaaaaagatattgataaagtgtacaaagaacagaatcaaatgaataaaattgcctcgaaagtacaaaacactattaaaacagacattaaacaagaagacagtaatacacatgtttataaagatggtaaagtcattgttattggtattcaattatataaagatcgtgaaaaaatgtattatttcgcatatgaaataaaagatggtaaggcagagattaatagagaaatagacccaattaagtatatgaaagaccataaagcagattatgaagatgaaaatgtagaagtggaaaaagattaacataggctttctttaaaacttttaaccagtttcaaaaagtaaatgagctttagcgacaataatttttaaaataaacacgatataaatttaaacatttatatataagaacacaaacgcaagtttgtaaataataataataaaggagtaagacaatggaaaaatcgatcaaaataatgacaataataggaattgttgttcagggtttagcaacggtatttagtttactattgatggttttagcagcatcaggtgtaatgactacagatgtgtcaacaacagttaatggtgaggttgacccagttgatgcagaaacagcagcagcaattttcactgtattattcttatccctattcatatttggaatcatttcaattattttaggtgcaatcggtatgtttaaagcatctaaaaacaaaaaaatgagtggtatattgttgattattggagctgtaataagtggtaacataattacatttgctttatggttaatcagtggtattaaactacttactaataacaagcctaaagatgaaataagcgacttatcataaacatcgtatattgaaatttcaagatttcttaagtaattaaataaagtgctctcttagaagtagattttcagtcaataactgcttttaagagagcattttgtatttgataatgctcatagcatcggataaaaatcattgacgaactttaaaaaaatacgttagacaatgcacttctaaatattaaaggcatcgactaacgcattgttcaaatatagttaattatttttataaaattgatgatgatcattcaagtaagcatagaataaacctataatgagtccgcctccaatatagttaccgataaaagccgcagcgatattcgaaatagctggtatgaagtgcaatgtatcaacttgataaattaaaccacccataaataagcaactgttgtaaacgacgtgttcataacccataaaggcgaatatggtaacaccgaacatcatgacaaacatttttgcgagtacatcgtcaatttgcatggcaataactaatgaaatattgataaagaaattggcgaagatcgctttcattaatatacttacaaaaccagtagacaacgttttatgctctataactgctgataactgatttaacatatctggcgtcattacatttgaaaaacgcatgaaactaaataaaatagcagcacctaaaatatttcctgcaaagcataataaaaatattttcaatactctagttggtttaattactttataatacaggcctacagtaaagtacatgaagttactggttagtagttcggagtttgtaaataaaatgagtactaacgcaaagctgaatgtaatggcactggccatattcacaatgcctggcggtaaatctggttcgtgtgttgctttaactgataatacgaagaccgtaataatcccgataataaatcctgccatcatcgcgcgtaataaataacgttttaaataaacgctttgtaatatatcttttgttcttatcgtttcgactacgttatttacccagtcgtccccataaaaaatcttatcccatttaatatgtttctccttcacaatgacatcctcacttttcatttgttaatcagagtatactatgaattgccttatttgtgaataatttcacaaaattaattttaaaaactaatatttttgaataacagctaggattttttaacaaatcatttattttaaaataatcaatagacagacggtatcactgaaaagtcatgaatttcatataaaaaagcctagtaacgatgggtcaatcattactaggcagtgagcatttattaagttgtcgcttgtttcggacggcgtataaatacatcgattatgaaaccgataatagcaaagagcatgaatggtacaagccaagctaaatcgatatctgctaaaggtaacatcataaacgatttcaaaataacaccgtgtaataagttgaaactatttagtatttgtaaaattgaaataatcaatgtaataacagttgcgagtcgataggcccaactgaatctgaatgtgctaaacatgttagcaaatgatatgagtacaagtgcaatcgacacgggatatattaaagtcaataatgggacagcaatttttaaaatcatttctaaaccaagtgttgtaaataagaaccctatgatagagaaaataagtgcgaatattttataagaaaacttaggtacgtgtttcttagtaaatgtggcgcaagcattgacgagtcctatacatgttgttaggcatgcaaggataaccgtcattccaaatacgaggttaccgaacgaaccaaataatcgtaatgagttgtacgtcaatatatctgtaccatctttaaagtttcctggagctgttgatgccccaacgtatgcaagtgcaaagtaaatcattccaagtaatatggctgcaataagacctgaaaagcagacatattttaaaattttcatgcgatctgtgaggcctttaaacttatagccattgacaatgactacggaaaaagctaacgcagcaacaagatccattgtaaaatagccttccaaacttcctgaaatgaaaggatgtgttatatatttatccttaggtgcacttagtgcagattcagggttgaaaatgacagcaatacttaatagagcgaccattaatagtaataacggtgttaataatttacctaaattatcaacgattttcgatggatttaaactaatccagtaaacgatggcaaaaaagattgctgcgaatataattaaagtccattggttatgcacaggtaaaatgtgtcttgtaccaatttcgtacgcgacatttgcagcacgtggaataccgtaaaatgctccgatagacatgtaaatcacgacagcaaaaataaacccgaaccatggatgtatacgattgcctacactttcaacaccttcatcataaaatgcaacaacaataacagtaataaaggggagtaatatgcctgtaagggcaaagcctagcataccaatccacatattttgacccgctgtatggccaagcatgggcgggaatattaaatttccggctccaaaaaatagtgaaaataacatgaggcccgaaataataacttgttttttcaatgtaatttccttcctaaaactagatattcataataatttaaaaaatctgaaaaataaaaacgttcttactttatctttaaatgacaatactatgattctattattttataaaaaagattgcaataataacgtcttgctattattggataatgacaattaaagtgtcgtttttatgaattaaaataggtgaaagtaagttggaaatacgttggagcgttgtgatttttatgagaaattgtatgagtgaggactgctatttataaaaggtaaactatggatgagtttatggttgttccaataggtaaataagagatagcacactgtacacataatgatacgtggatgagtgaatatgtctgataggaaggcctagtcactcaaatgaatttaagtttattacgtgataaatcacaaatctctctcatgtgataggtctcccattaaatcatgcttatatgaaatgttcacatatttgttagcttttcaagaaataatattaaatatcttttcatagtatagcaatattaaataaatgcatttataattttaactgtattttaaatattaatcatgaggtgataagatgaataaaatttcaaagtatattgcaatagcatcattatcggtagcggttacagtttcagcaccacaaacgacaaattctacagcgtttgccaaaagttctgctgaagttcaacaaacgcaacaagcttctataccagcatcacaaaaggcgaatcttggtaatcaaaatattatggcagtggcttggtatcaaaattcagctgaagcaaaagcattatatttacaaggttataacagtgcaaagacacagttagataaagagattaaaaagaataaaggtaaacataagttagctattgctttggatttagatgaaacagttttagataattctccatatcaaggctatgcatcaatacataataaacctttcccagaaggttggcatgaatgggtacaagctgctaaagctaaacctgtctatggcgcaaaagaattcttgaaatatgctgacaaaaaaggtgtcgatatctactatatttctgatagagataaagaaaaagatttaaaggcaacacaaaagaacttaaaacaacaaggtatccctcaagctaagaagagtcatattttactaaaaggtaaagatgataagagtaaagaatcacgcagacaaatggttcaaaaggatcataaacttgtcatgctatttggagataatttattagactttacagatccaaaagaagctacagctgaatctcgtgaagcattaattgaaaaacataaagacgatttcggtaagaaatatatcattttccctaacccaatgtatggtagttgggaagctacgatttacaacaataactataaagcaagtgacaaagcaaaagataaattacgtaaaaatgctattaagcaattcgatcctaaaacaggcgaagttaaataatatatgaattggacgtctacatgtacttaaaggtatatgtaggcgtttttaaattgatccttaattttaaatgtaccgtacaaaaataatagacaattaattgcattttccataaatttgcttttaatataaaaagttcgggtataatgaaggataagtgtatgtataacattacagagcgcaacacgacgtacgtgcatctaagaatataaacaatgtttaaatcatagtagtagggagagaaatgcatgtttttagcttggaatgaaatacggcgcaacaaattgaagtttggactaattattggtgtgttaacgatgattagttacttgctatttttattatctggattggcgaatggtcttatcaatatgaataaagaaggcattgataagtggcaagcagatgccattgttctaaataaagatgccaatcaaactgtgcaacaatctgtttttaacaagaaagatattgaaaataaatacaagaagcaagctactttgaagcaaacaggggaaattgtgtctaatggccatcaaaaagacaatgttttagtgttcggtgttgaaaagtcatcatttttagttccgagtttaatagaagggcataaagcgactaaagataatgaagtgttagctgatgaaacgcttaaaaataaaggatttaaaattggtgacacattatcactatctcaatcagatgaaaaattgcatatcgtaggttttacagaaagtgcaaaatataatgcgtcatcagtcattttcacgaatgacgctaccattgccaagatcaatcctagattgactggagataaaattaatgcagttgttgtacgtgatacaaattggaaagacaaaaaattaaaccaagagcttgaagcggtaagtattaatgactttattgaaaatttaccaggttataaaccacagaacttaacattaaactttatgatttcattcttatttgtcatttcagctacagttataggcattttcctatatgtcatgacattacaaaagacgagtttatttggcatattaaaagctcaaggatttacgaatggctatttggcgaatgtggtaatttcgcagacggtcatattagcactatttggtacggcatttggcttactgttaacaggcgttacaggtgcatttttacctgatgcagtacctgtcaaattcgatgtactaacattgctcgtatttgcaattgtgttaatgattgtctctgtattaggaagtttattctccattttaacaattagaaaaatagatccgttaaaggcgattgggtaggaggtgtagcaaatgttgaaatttgaaaatgtaacaaagtcatttaaagatgggaatcgtaacattgaagcggttaaagatacaaattttgagataaataaaggtgatattatagcattggttggaccttctggctctggtaaaagtacatttctaactatggcaggtgctttacaaacaccgacatctgggcacattttaatcaataaccaagatattacgacaatgaagcaaaaagcattggcaaaagttagaatgtctgaaataggttttattttacaagctacaaaccttgtaccatttttaacggtaaagcaacaatttacattattgaaaaagaaaaataagaatgttatgtctaatgaagactatcagcaacttatgtcacaattaggtctaacttcattgcttaataagttaccttcagaaatttcaggtggtcagaaacaacgtgtggcgatagccaaagcgttatatacgaatccgtcgattattttagcggatgaacctaccgcggcgttagatactgaaaatgcgattgaagtcattaaaattctacgtgatcaagccaaacaaagaaagaaagcatgtattattgttacacatgatgaacgacttaaagcatattgtgatcgttcatatcatatgaaagatggcgtccttaatcttgaaaatgaaacagtagaatagttttattaagccggtacatcatgtgccggtatttttatgtttatgtattatttgaataaactttcacattcaattaataataattattatcgaaaatcagaaatattccgtgaaatataatattttttgtagtaaaatggcctctaagtattcaatatttaaatatggggattgaatataaaattatcgtaatgggggtcaatggttatggatttattgataggtactttatttttatttttggtcttagtgatttttacattatttacatataaagcgcctaatggtatgcgtgccatgggagcattagctaatgcagcaatcgcaacatttttagtggaagcatttaataaatatgttggtggcgaagtattcggtattaaatttttagaagagctaggagacgctgcgggaggtctaggtggtgtcgctgccgctggattaacagcattagctatcggtgtgtcaccagtatatgcattagttatagcagccgcgtgcggtggtatggatttattaccaggtttctttgcgggttatatgattggatatgtgatgaaatatacagagaaatatgtgccggatggtgtcgacttaattggatcgattgtcatcttagcgccattagctcgtcttattgcagtattattaacgccagtagtgaatagtacattgattcgaattggtgatattatccaaagtagtacgaatacgaatccaattatcatgggtatcattttaggtggtattattacggttgtcggcacagcgccattgagttcaatggcattgacagcattattaggtttaacgggtgtacctatggctattggtgccatggcagcatttagttcggcatttatgaatgggacgctattccatcgcttaaaattaggtgatcgtaagtctacgattgcagtaagtattgaacctttatcacaagcagatattgtatcagccaatccaattccaatctatattacaaatttctttggtggtgcgattgctggtttaattattgctatgtcaggtttaattaacgatgcgacaggtacagctacaccgattgcaggatttttagttatgtttggatttaatcatccgacgacaattgtgatttatggtgtagtaatggcgattgtaggtgcgcttgcaggttatcttggttcaattgtatttaaaaaatatccaattgttactaagcaagacatgattaatcgaggtgcagtagacgcatagcatcatcatattgaatagtaaaaacaaataaaacatagtaacgtgattcagtcgatgtaacagtcgataatgagtcacgtttttttatagaaaaatacaagacataaaaatgtcataatttattgtcgacaaatatcatactgtataaacatttatcattttttcaagtaccttttacacgatggaatgaacttactttttacgaaattatgcgtattttataaacaaatatcattgatataacggtaaatgtaagcgtttacaacagaaataacagcatgctacgatatttttgtaaattcactgattcaagtattttaagtcaatatgaggagggatgttatgagcgattctgagaaagaaattttaaaaagaattaaagataatccgtttatttcacaacgtgaacttgctgaggcaattggattatctagacccagcgtagcaaacattatttcaggattaatacaaaaggaatatgttatgggaaaggcatatgttttaaatgaagattatcctattgtttgtattggcgcagcgaatgtagatcgtaagttttatgtgcataaaaatttagttgcagaaacatcaaatcctgtaacgtcaacacgctctattggtggcgtagcaagaaatattgctgagaacttaggtaggcttggcgaaacggtcgcttttttatctgctagtggacaagatagtgaatgggaaatgattaaacgattgtccacaccatttatgaatttggatcatgttcaacaatttgaaaatgcgagtacaggttcatatacagctttaattagtaaagaaggcgacatgacatatggcttagcagatatggaagtgtttgactacattacgcctgaatttttaattaagcgttcacacttattgaaaaaggctaagtgcattattgtagatttgaatttaggcaaagaggcattaaacttcttatgtgcctataccacgaaacatcaaatcaaattagttatcaccacggtttcttccccaaaaatgaaaaatatgcctgattcattacatgctattgattggattatcacgaataaagatgaaacagaaacatacttaaatttaaaaatagaatctactgatgatttaaaaatagctgctaaacgctggaatgatttaggtgttaaaaatgttattgtgacaaatggcgtgaaagaactcatttatcgaagtggtgaggaagaaatcattaagtcagttatgccatcaaatagtgtgaaagatgttacaggtgcaggcgattcattctgtgctgcagtagtgtatagctggttaaatgggatgtctactgaagatatattaattgctggtatggttaacgcaaagaaaacgatagaaacgaaatatacagttaggcaaaacctagatcaacagcaactttatcacgatatggaggattataaaaatggcaaatttacaaaagtatattgagtattctcgagaagttcagcaagcacgggagaacaatcaaccgattgtagcattagaatcaacaattatttcgcatggtatgccgtacccacaaaatgttgaaatggcaacaacagtagagcaaattatcaggaataatggtgccattccagcaaccatagccattatagatggcaaaattaaaattggtttagaaagcgaagatttagaaatactggcaactagtaaagacgttgctaaagtatctagaagggatttagcagaagttattgcgatgaagtgtgttggtgctactactgtagcgacgacgatgatatgtgctgcaatggctggtattcaattttttgttacaggaggtattgggggcgtccataaaggtgcagaacatacgatggacatttcagcagacttagaagaactgtctaaaacaaatgtcactgttatctgtgcaggtgccaaatcaattttagacttacctaagacgatggagtatttagaaacaaaaggcgttccagttattggatatcaaacgaatgaattgccagcattcttcactcgcgaaagcggtgttaagttaacaagttcggttgaaacgccagaacgacttgctgacattcatttaacaaaacagcagttaaatcttgaaggtggcattgttgttgctaatccaattccatatgagcatgccttatcaaaagcatatattgaggcaatcataaatgaagctgttgttgaagcggaaaatcaaggtattaaaggtaaggacgccacaccgttcttgttagggaaaattgtagaaaaaacgaatggtaaaagtttagcagcaaatataaaacttgttgaaaacaatgcggcgttgggtgctaaaattgctgtcgctgttaataaattattgtaggtgatgatacatgaatattttattcgctatcacagggatagcatttgcactatttgttgcgtttttattcagttttgatcgtaaaaaaatagacttcaaaaagacgttaataatgatatttattcaagtgttgatcgtgttatttatgatgaacacaacgattggtttgacaattttaactgcactaggttcattttttgaagggctaataaatattagtaaagcaggcataaattttgtttttggagatatacaaaataaaaatggctttacgttctttttaaacgtattactgccattagtttttatttctgtattaataggcatctttaattatattaaggtattaccatttattatcaaatatgtaggtatcgctattaataaaataactagaatggggcgcttagaaagttattttgctatttcaacagcaatgtttgggcaaccagaagtatatttaacaataaaagatattattccaagattatctagagcgaaattatatacaattgcgacgtctggtatgagtgctgttagtatggcaatgctaggttcatatatgcagatgattgaacccaagttcgtagttacagcagtaatgttaaatatttttagtgcgcttatcatcgccagtgtaatcaatccctataaatctgatgatactgatgttgaaattgataacttaacgaaatccacagaaactaaaacattgaatggaaaaacaggaaaacctaagaaagttgcctttttccaaatgattggtgatagtgcgatggatgggtttaaaatcgctgttgtagtagccgtaatgttgttagcatttatttcattaatggaagcaattaatatcatgtttggtagtgttggtttgaactttaaacagcttattggctatgtgtttgcaccaatcgcattcttaatggggattccatggagcgaagctgttccagctggctctttaatggcgactaaattaattacaaatgagtttgtagcaatgcttgattttaaaaatgtcctgggtgatgtatcagctcgaacacaaggtatcatttcagtttacttagtaagcttcgctaattttggtacggttggtatcatcgtaggttcaattaaaggcattagtgataaacaaggagaaaaagttgcatcctttgcaatgaggttgctacttggttcaactctagcttcaatcatttcaggatcaatcattggcttagtattgtaaatgaatcgaagtacctaaattaaattcatggcaaagctaaaccccgtcaccaagttggcgcaacagcgcatcataacttagtgacggggttttatcataacaatctactttttcgtagccgtttttgaaatgtatgttgatggtttatctttttcaaaaattgttaatcccgttatatcttttttatgttttgaagggacaatgaagctaagtatataagcaaagacaaaagcaactgtaaatgaaatggtagatacatagaaaggtgagttacctttgccaacaccattatagacataagcaaagatgatacccaatattaatccacaaataacaccgaatgtattcgtacgtttagtgaaaataccaactgcaaatacaccagccaatggaacgccgaataatccagtcacaaacaagaataaatcccataagtcatttgaattagaagcaattaagtatagtgacattccaaaaccgaaaatacctgcaatgataataatgaaacgtgcaaagttaacttcgtgtcgctcgctaccttttccgaagaagcgttgcttaatgtcgattgaaatacaagcagatatagaatttaaactagatgaaatggtagactgtgcagcggcgaaaatggctgcaataagtaatcctgctacaaatggtggcatctcagtcaaaatgaaatatggcactacagatgatgtattgaagccttttggtaaaacagcttcatgtgtataaaatgaatacagcattgtacccataccataaaataagggtgctgaaattaaagctaggataccatttgtccataacgatttatttgtttcttttaaactatcagaagcttgataacgctgcacgacgtcttgactcgctgtgtattgatacaagttgttgaaaatatttcctaggaaaataattggaatggcagctgccgcagtatttagtttccaattgtctgcactaattaattttttgtgctcaatcgcatctgcaaagacagtgccgaaaccgcctttaatgttcacaacacctagaataataataactaaagcgccgcctaataaaatgacgccttgaatgaaatcactccaaaccacaccttcgaaaccacctaaaaatgtatataaaatacatagtaaaccaacgagtgatgcaacgatataagggttcatgtctgatacagatgtgattgctaatgttggtaagtagataacaattgcaacacgccctaaatggtaaacgacaaataataatgagccaatgacacgtatgctagggccaaatctagcttctaaatattcatatgcagatgttacctttaactttttaaagaaagggacatagaaataaataagtaatggaataattgcgacgatagcaatgttaccagcgatatatgaccaatctgttaaaaatgctttctctggtgtcgacataaatgtaatcgcacttaacgtagtagcataaattgaaaagccaactacccaagatggcaagcgaccacttgcggtaaagaaactattggtactttggctcgcgcgcttggtaaaataaacgccaatgaacaacatagctagtagataaatgataacggcaacccagtttagtgtgccaaatccaacttctttcatgggcaacatcccctttacaatgtattgattctttgatgtctataaatcgtattttgcaatgagttgatctaatgtttgtcgatgtgcttcgttaaaaggtttgaaaggtcttttcggtaatcctgcatcaatgccacgatgacgtaatatttctttcaatgttggataaatccccattgataacactgtttcgataatgtcgtttgaatcatgttgcagttggtaagcttcttgaatttgaccttgtcgtgctaagtcgaagatttttcttgcacggcgaccattaacgttatatgtagaaccaattgcaccatctacgccagaaatcgtagcttgaactaacatttcatcaaagccagataagattaatttgtctgggaatgcttttctaatacgttcgagtaggaagaagtttggcgctgtatatttaacaccaacaattttttcatgattaaatagctcgctgaattgttcaatagaaatattcacacctgttaaatctggtattgcataaataatcatattgttctgagttgcttcgataatatcgaaatagtaatctctaatttcttcaaaagtaaatggatagtagaatggtgttacggcagaaagtgcatcataaccgagttctgtggcatattttccaagttcaatggcttcatttaaatctaacgaacctacttgagcaatcaatttcactttatccccaactgcctctttggcaaccttgaaaacttgcttcttctgctctgtatttaataaaaagttttcgcctgagctaccatttacataaagaccgtctaattcttcagtttcaatggcattttgagcaatttgtttaagtccttgttcatttacttgaccattttcatcaaaaggaacgagtaacgctgcatataaaccttttaaatctttgttcattatgaagtccctccaaaaatcatttgataatatagtttacagctataattgtaaacgctatcataaaatgtaacaatatctttttgaaaattgtagtcatatttatgtataattaatgaaaatgtttttcaaaatcaatagaaatggagtgagtaaggtgtattacatcgcaatcgatattggaggcactcaaattaaatcggcagttattgataagcaattgaatatgtttgactatcaacaaatatcaacgccggacaacaaaagtgagcttattactgacaaagtatatgagattgtaacaggatatatgaagcaatatcagttgatccaacctgtcataggtatttcatcagcaggcgttgttgatgaacaaaaaggcgaaattgtatacgcagggccaaccattccgaattataaaggtactaattttaagcgattattaaaatcactgtctccttatgtcaaagtaaaaaatgatgtaaacgctgcattactaggcgaattgaaattacatcaatatcaagcagaacggatcttttgtatgacgcttggtacaggcattgggggtgcgtacaagaataatcaaggtcatattgataatggtgagcttcataaggcaaatgaagttgggtatttattgtatcgtccaactgaaaatacaacgtttgagcaacgtgctgcaacgagtgcattgaaaaagcgcatgattgccggaggatttacgagaagcacacatgtgccagtattgtttgaagcagctgaagaaggtgatgatattgcaaaacaaatattgaatgagtgggcagaagatgtagcagaagggattgcccaaatacaggtcatgtatgatccagggcttatattaattgggggcggtatatctgaacaaggagataatctcattaaatatatcgagccgaaagttgcacactatttaccaaaagactatgtttatgcaccaatacaaacgactaagagtaaaaatgatgcagcattatatggctgtttgcaatgatagttgaaagaaggagtcattctaaaatagaatttgaaaccgttacgagagatgagagctgttgttagttccacacatcacactctatctaggaccaatctaaactatatcaaccaacagtgtgccacgggcaaattaaattgaagaagctgagatattaaaattttagaaaatgtaaaaaaatatttggtattgaaattaaaaaagcacctagcaactcgttgggacaatcacgatgattgtctacagttgcaggtggatttgaatatactactagttatttgttgtctaggataatagatttagtatgttgataagtttgactcagattcgtattttctaataaatgataactcacgatatcgattaaaaagagtgtcgcaatttgtgtgttgataaattgatggtcggtattacgcgattgatccgttgttaaaagtactaaatctgcacaatctgtaagtttactaccttcaaaatttgtgatggcaacgacatatgcaccatgagatttggcgacttccgctgcagaaattaattccgaagtattaccactatttgacatagcaataaacatatccgaatgagatagtagggatgccgatattttcattaaatgtgaatcggtagtaacattaccttttagccccatacgaatcatacgataataaaattcagtcgctgataaaccagagctacctagtccagcaaagagtatatgtcgacttgattgaagtttgtcgataaaggtttggataatgtcgttatcaataaattcaccagtttgttgaatgatttgttgatgatatttatgaattctttgaataattgggctattttcaataactgtctctgtcatttcttgttgaatattaaattttaaatcttggaaattctcataatccagcttatgactaaagcgtgtcatcgttgctggtgatgtaccaatcgcatgggctaaggagttaatcgttgaaaaggcatcgctataaccattttgtcttatataattgacgatgcgtttatcagtttttgtaaataaatgttgataacgttgaacacgattctcaaatttcattgtgtcaccccttcatcttaatgattactattatatatgaaaaatattttcaagatagtaaaaagcattgataaaaattatcttaatgatatattgtaaatgactttacgtgaaaaaacgacttatggagtgaggaataatgttaccacatggattaatagtatcttgtcaggcactaccagatgaaccattgcattcatcttttattatgtcgaaaatggcattagctgcgtatgaaggtggtgctgttggtattcgcgcaaatactaaggaagacattttagcaattaaagaaacggtagatttaccagttattggcattgtgaaacgtgactatgatcactcagatgttttcattactgcaacgtcaaaagaagttgatgaactgatagaaagccaatgtgaagtcattgcattggatgcaacgttacagcaacgtccgaaagaaacgttagacgaattagtatcatatattagaacacatgcaccgaacgttgaaatcatggctgatatcgcgaccgttgaagaagctaaaaatgccgcacgacttggctttgattatattggcacgacgttacatggctatactagttatacgcaaggacaattactttatcaaaatgacttccaatttttaaaagatgtactacaaagtgttgatgcaaaagttattgcggaaggtaatgtcattacaccggatatgtataaacgtgtgatggacttaggcgttcattgttcagtcgttggtggtgcgataacacgaccaaaagaaattacgaaacgttttgttcaaattatggaagattaaatgataacgataaaaaaacgagatgaccatcattaattaaaggcacctaattatcttaggtggctgaatgaatgtaatgggttcatctcgttttgtttgtttatgatagtgattttattttcaactttatccaaaaataagtaaagcgacggggatggtgattaatagcgacaacgccacgcgtaaaaaccaaatgatgatgagtttccagacaggtattttaatttcagttgctagtatacatggcactaatgctgagaaaaagataatggctgatacgcttactacaccgacgacaaatttagtactcattgcagctttagttactaacaaagatggtagaaacatctctacaatagaaatcgctgacgcttttgctagtaaagcctgatcagcaattgggaaaatataaataaatggatagaagatatagccaagccaatcaatgaatggtgtatagttcgctacaatcagtcctaaaaaaccaatcgataatatagaaggtaaaataccaacagtcatttctaaaccgtctttcaaattgtcccaaacgttcttcacgagagatggtgttaatgcattttgtttcatcgcctctgcatatgcagttttcagtctgcttccttcaatagcaacttcttgttctccttcttgtccgttataatattctgttgattcattgctgattggcggtagccatgcagtaattgcagtcacgacaaatgtgatgactaaagttatccaaaagtataaattccaatgcggcattaatcctaaagttttagcaacgataatcataaaagttgctgaaactgttgaaaagccagtcgcaataatcgtggcttctcgtttgttgtacatcccttgcttatagacacgattagtaatcaataatcctaaggaataactgccgacaaacgaagccactgcatcgacagcggattttcctggtgttttaaaaataggtctcataataggctccatataaacaccgacaaattctaataagccatagcccactaataaagaaagcgcaattgcacctactggaattaagatacttaatggcatcattaatttttcaaacaaaaacggaccatagttagctttaaatagtattgatggaccgattttaaatacatacattataccgatcattgcacctgcaactttaaataatgtaatgaccaagtttgtgattgaagtcataaaagtacgtctcactattggtaacgctgtaccaattaaaatcataatcagtgcaacatagggcataagtggacctatgattgagcgaatggctagatgaacatgatcgacgaaaatagtgttgttaccattaatcgtaaaaggaataaagaaacatagtatgcccactaaactatagacaaaaaaacgccatgcacttggttgttgtgcattagaatgatattgattcattaaagcaacccctttgtttaaatgaatacacaaaactgtatgatgcatcttccccttaatgagatgaatcattattttaatttagaaaaatctgaaaacttactataattgtatagtttgaattattttcataccaatacaaattaactaattatatatagattgaaactatattacttaataaaatatttatcttaaatgttgttgtgttgattcaacaccacaactaaaagtgtttataaattatttggaaatacacatatttgtaaatgattagtatcgatttaatatcgtattattaaatttttattaattttgtagtcttaatcaaaaaataatatatgtcatgttatattgaaggtgcagttgtttttcattctcaagagggggtcaaaaaaatacttttgaggtgattatatgttaagaggacaagaagaaagaaagtatagtattagaaagtattcaataggcgtggtgtcagtgttagcggctacaatgtttgttgtgtcatcacatgaagcacaagcctcggaaaaaacatcaactaatgcagcggcacaaaaagaaacactaaatcaaccgggagaacaagggaatgcgataacgtcacatcaaatgcagtcaggaaagcaattagacgatatgcataaagagaatggtaaaagtggaacagtgacagaaggtaaagatacgcttcaatcatcgaagcatcaatcaacacaaaatagtaaaacaatcagaacgcaaaatgataatcaagtaaagcaagattctgaacgacaaggttctaaacagtcacaccaaaataatgcgactaataatactgaacgtcaaaatgatcaggttcaaaatacccatcatgctgaacgtaatggatcacaatcgacaacgtcacaatcgaatgatgttgataaatcacaaccatccattccggcacaaaaggtaatacccaatcatgataaagcagcaccaacttcaactacacccccgtctaatgataaaactgcacctaaatcaacaaaagcacaagatgcaaccacggacaaacatccaaatcaacaagatacacatcaacctgcgcatcaaatcatagatgcaaagcaagatgatactgttcgccaaagtgaacagaaaccacaagttggcgatttaagtaaacatatcgatggtcaaaattccccagagaaaccgacagataaaaatactgataataaacaactaatcaaagatgcgcttcaagcgcctaaaacacgttcgactacaaatgcagcagcagatgctaaaaaggttcgaccacttaaagcgaatcaagtacaaccacttaacaaatatccagttgtttttgtacatggatttttaggattagtaggcgataatgcacctgctttatatccaaattattggggtggaaataaatttaaagttatcgaagaattgagaaagcaaggatataatgtacatcaagcaagtgtaagtgcatttggtagtaactatgatcgcgctgtagaactttattattacattaaaggtggtcgcgtagattatggcgcagcacatgcagctaaatacggacatgagcgctatggtaagacttataaaggaatcatgcctaattgggaacctggtaaaaaggtacatcttgtagggcatagtatgggtggtcaaacaattcgtttaatggaagagtttttaagaaatggtaacaaagaagaaattgcctatcataaagcgcatggtggagaaatatcaccattattcactggtggtcataacaatatggttgcatcaatcacaacattagcaacaccacataatggttcacaagcagctgataagtttggaaatacagaagctgttagaaaaatcatgttcgctttaaatcgatttatgggtaacaagtattcgaatatcgatttaggattaacgcaatggggctttaaacaattaccaaatgagagttacattgactatataaaacgcgttagtaaaagcaaaatttggacatcagacgacaatgctgcctatgatttaacgttagatggctctgcaaaattgaacaacatgacaagtatgaatcctaatattacgtatacgacttatacaggtgtatcatctcatactggtccattaggttatgaaaatcctgatttaggtacatttttcttaatggctacaacgagtagaattattggtcatgatgcaagagaagaatggcgtaaaaatgatggtgtcgtaccagtgatttcgtcattacatccgtccaatcaaccatttgttaatgttacgaatgatgaacctgccacacgcagaggtatctggcaagttaaaccaatcatacaaggatgggatcatgtcgattttatcggtgtggacttcctggatttcaaacgtaaaggtgcagaacttgccaacttctatacaggtattataaatgacttgttgcgtgttgaagcgactgaaagtaaaggaacacaattgaaagcaagttaaattcatcttctgaatttaatatgctatgtaaatcgtgctgttatcatggcacatcagatataagtagcatcacagtgttgaatttaaaaatagtaaagtgaaataaagcgcctgtctcattagcgaaaactaaagggacaggcgtatctgtttatgagcttaataaattgtatgaataatatggttgatcgaataactgtttatcatgatgataaattgagttttttaaaataatgatatattacatcattgttatagcgtttaagaaatcaacaactttacgataaatagtgattgcttcgtcattaggtctacgatcaaaatcatgctcgtttttattcacgcgttcaaatgttgaatgtggaacatgattcatgatatgttcgctttcctcaacgggaacatcataatcgccattacaatgcgcaatgaaaacaggtggaagtgttttaagttcatctggtgcaatattatattttgaattagtataatcagcaatgttaatcatatttatccatttacctgtgccacgtgcataaacgtagattaaaaaacgttgtgcgatttgatcttgaacaaccggtgttggtgaagtgagttgtgcaatcattgtttcgtttacgctttgagctatttttgcgtaataactattagttgttttaaaaggttcagtgttgatgcgactataaccataaaaatcaataacaccatcaatatctctgtctcgtgcaattaatagacttaaatatgcacctgatgatctgccaaaggtaaaaatagggcaattagaatattgtgattgaatcgcatcgaatgatgcgtagacatcctcaataatgcaatcgagacttacttctggtaataaacgataacttagttgaattaaatcgtaatgttccgtaaggatatcgatatactgtggggataaatcgttagctttaccgaacattaatccaccaccgtggatgtagacaatagcgccttttgttggttgattttttgctttaataattgtgtaaggtaatgcaaatgcatctttagtaattactttatctttaatttcagtcacgatttaataggctccttatttttgatattgatgtcattataacactgtcttaaatttccatgaaaaatagtcttaagacgatgagtcatgataattctgttccaattgacgtaaagcgtcacgggtatgcttctttagaccttccccataatccatcattttaacaatatctttaaaagcagcatgtggaatggctaaatcttctaaatctgccatagaaaattcaagattgatatcatgtggtcgctgttcagcaagtttatgcacaaagtcaggttctgtgacaaaaggcgaagacatgccgaccatatctgcatgttgtaaagcatctaaagcagactctggagaattaatcccgccacttgcaattaaagggatacgacctgctaaatgttcatagacaatttggttaactggtcgaccgaaatgatcacctggtgtacgagacgtattttgataaatatgtcgaccccagctagcgattgctaagtattggatgtttgaaacgtccatgacccaattgattaattggttgaactcgtcaatggtatatcctaaatcactgcctctggtttcttctggcgttgctcgaaatcctaaaataaaattgtcaggtgcttctttatcaatcacttcttgtaccgcacgcataacttctaaacataatcttgcacgattttttaatgagtcggcaccgtaatggtctgtacgtttattcgaaaaagttgagaaaaatgtttgaatcagcaaacgttgtgcaatcgaaatttccacaccatcaaaacctgctttaatcgcgcgtaatgtagcatcgcgatactgctgaatgatgctattgattttctcatgagacatggcgataacatcgtgttcaatcggtgaatgcaatgtcatagggcttggtccatacacctttccaaaatttaaaatggcttgatttgaaaaacgaccagcatgcgctagctggataatagcgaggctaccatgttgtttcatcgtagatgccatgttagttaatccagggatacaagcatcatgatcaatattaaagccatattcaaacaattgaccataaggttcaatgtaagcagcgccggtgacttgcattccagctgaattagagcgacgtgcagcataagccaagtcttcttttgtaatatagccttcttttgttgatgtgtttacggtcattggtgataatacaaagcgattcgaaattttgatgccattaggtaagtggattgattgtaaaagtggtttgtatcggtacatactatgattccttttctattcaatattgttttcaaagtaccatggaaagaatgaataatcaatgatgaacagtcttgatagaatagaattggtacatggaaagtatttttaaaattaaactaatgaatggcatttgtaggtctgaaaatatgaatatgaaaaagaaaaataaaggcgaaaagatataaaagttaattgaaaaacgttatcatatacgtgggtatatgaagagggaatggtattaagaacgctaaaatgttatgtcggtttgacatgacaggataagtttggagatgacggattggttaaattaagcgtattagactatgccttaatagatgaaggtaaggatgcacaaaaggcattgcaagattcagtgacacttgcaaaattagcagatcgacttggctttaagcgaatttggtttacggaacatcataatgtaccagcgtttgcgtgtagtagtccagaacttttgatgatgcatacattggcgcagacaaatcacatacgagttggctctggtggtgtgatgctgccgcactatcgaccttataaaattgctgagcattttagaatgatggcagcgttatatccaaatcgtattgatttaggtattggtaataatccaggtactactatggtaaagcaagctttagatggaataaatcctacatatgatagttacgatgaatcgatttcgttattacgtgattatcttacaataaaggataaaccaagtgcgcatacgttaggtgtccaaccacacattgatcattttccagaaatgtggttattaagtagtagcgcaacatctgccaaaatagctgccgaactaggtatagggctttctgttggaacatttttgctaccagatataaatgcgatacatacagcgaaggataacattgatatttacaaaaaacatttccaagcatcaacgattaaaatggacgcaaaggtgatggcatctgtatttgtcattgtagctgataacgaagcggaagtagcagcattacaacatgccttagatgtttggttattaggtaaattacaatttgcagaatttgaagattttccttcagtagacacagcacaaaagtataagcttaatgatcgagacaaagagatgattcaagcacatcaagcacgcatcattgcaggtacacaagaaaaggttaaagcacaattagatgatttcattgctacgtttgaagttgatgaggtgttagtagcaccgcttattccaggtattgaacagcgttgtaaaacattaaaattactcgcggaaatttatttgtagcattttaaatagaagagaaaggatgaagataagatgaaaaagttagccaattatttatgggtagaaaaagtaggagatttgtatgtgtttagtatgacacctgaattgcaagatgatattgggacagtaggttatgttgaattcgtaagtccagatgaagttaaagtggatgatgaaattgtgagtatcgaagcatcgaaaacggtcattgatgtgcaaacgccattgtcaggaacgattattgagcgaaatacaaaagcggaagaagaaccgacaattttaaactctgaaaaaccagaagaaaattggttgttcaaattggatgatgtcgataaagaagcattcctagcattaccggaggcttaaatggaaacgttaaaatcaaataaagcgagacttgaatatttaatcaatgatatgcatcgagagagaaatgacaatgacgtattggtaatgccatcttcatttgaagatttgtgggaattatatcgaggcttagcaaatgtcagaccggcattacctgtaagtgatgaatatttagctgtacaagatgctatgttaagtgatttgaatcgtcaacatgttacggatttgaaggatttgaagccgataaaaggtgacaatatctttgtttggcaaggtgatatcacgacgttaaaaatcgatgctattgttaatgctgcaaatagtcgttttctaggatgtatgcaagctaatcatgactgcattgataatattattcatacaaaagcgggtgttcaagttcgacttgattgtgcagagatcattcgacaacaagggcgcaatgaaggtgtaggtaaagccaaaataacacgtggatataatttgccagcaaagtatataattcatacggttggtccgcaaatacgtcgattgcctgtttcaaagatgaatcaggacttgttagctaaatgttatcttagctgtcttaaattggctgatcaacatagtttaaatcatgtcgctttttgctgtatatctacaggtgtatttgcttttcctcaagatgaagcagcagaaattgctgttcgaacagtagaaagctatctcaaagaaacaaattcaacattgaaagtcgtgttcaatgtatttacagataaggatttacaactgtataaggaggcatttaaccgtgatgcagagtagtaagtggaatgcaatgtctctgttaatggatgacaagacaaagcaggctgaagtattgcgtactgcgattgatgaagcagatgcgatagtgattggaattggtgcaggcatgtctgcatctgacggatttacatatgtaggagagcgttttacggaaaatttcccagattttattgaaaaatatcgcttctttgatatgttgcaagcgagtttacatccttatggcagttggcaagagtattgggcatttgagagtcgttttattacattaaactatttagatcaacctgtaggtcagtcttacctcgctttaaaatccttggtggaaggtaaacagtaccacattataactacgaatgcagataatgctttcgatgtagctgattatgatatgactcatgtatttcatatacaaggggagtatatactgcaacagtgtagtcagcattgtcatgctcaaacgtatcgcaatgatgatttaattcgtaaaatggttgttgcgcaacaagatatgcttataccttgggagatgattccaagatgtccaaaatgtgatgccccaatggaagtgaataaacgtaaagcggaagttgggatggttgaagatgctgaatttcatgcgcaactacatcgttataatgcttttctagagcaacatcaagatgataaagtgttgtatttggaaattggaattggttatactacaccacaatttgtgaagcatccttttcagcgtatgacacgtaaaaatgaaaatgccctttatatgacgatgaataaaaaggcatatcgcattccgaattcaattcaagaacgtaccatacatttaactgaggatatctcaacattgattacagcagcactccggaacgacagcacaacgaaaaataacaacattggagagacagaagatgtacttaatagaaccgattagaaatggagaatatattactgatggtgcgattgcactcgctatgcaagtttatgttaaccagcatatctttttagatgaagatattttattcccttattattgtgatccaaaagtggaaattggacgttttcaaaatactgctatagaagtgaatcaagattatatagataaacacagtattcaagtagttcgccgagatactggtggtggcgctgtgtatgttgataaaggtgccgttaatatgtgttgtattttagaacaagacacttcaatttatggtgattttcaacgattttatcaaccagctataaaggcgttgcatacattaggtgcaacagatgtggtacaaagcggtagaaatgatttaacattgaatggtaaaaaagtgtcaggcgccgcaatgacattaatgaataatcgtatttatggcggttattcgctattacttgatgttaattatgaagcaatggataaagtgttaaagcctaatcgcaaaaagattgcatcgaaagggattaaatctgtgcgcgcacgtgttggtcatcttagagaagcactggatgaaaagtatcgtgatataaccattgaagaatttaaaaatttaatggtgacgcagattttgggaatcgatgacattaaagaggcgaaacgatatgaattaacggatgcagattgggaagcgattgatgaattagctgataaaaagtataaaaattgggattggaattatggcaagtcacccaaatatgaatacaatcgaagtgaaagattatcttcaggtacggtagacataacaatttctgttgaacaaaatcgtatcgcagattgtcgtatttatggggatttctttggacaaggtgatataaaagatgtggaagaagcattacaaggaacaaaaatgacaagagaagatttaacgcatcagttaaagcaattagacatcgtttattattttggcaatgttacggtagaagcattagtggatatgattttaagttaatattgttattttatgtatgctgaatcattggaagtgtttgcttgctcttgaaaaggtgacaatagtgtttggtgaaggttgaacatatgagtggaaattattgcctttaactattcaaagtatgatatatatatggtttttgtttctaaatgattgggtatttgaaaatagatgagtttaatattttaaggaatataatgatgtttacttttataattcatatagaatattaagcaatataagtctgttgatatatacaaaatataatgactgctataatgagtaatcaatagacacaaagaggagattatgtgatgaataataaagtattagtaaccggtggtacagggtttgttggcatgcgaattatttcacgattattagaacaaggttatgacgtacaaacgacgatacgtgatttaagtaaagctgataaagtaattaaaacaatgcaagacaatggcatttccacagagcgattaatgtttgtcgaagcggatttatcacaagatgaacattgggatgaagcaatgaaagattgcaagtatgtcttgagtgtagcatctccggtgtttttcggtaaaacagacgatgcagaagtgatggcgaagcctgcaattgaaggtatacaacgtattttaagagctgcagaacatgcgggtgttaaacgtgtggtaatgactgcaaactttggtgcagttggttttagtaataaagataaaaattcaatcacaaatgaaagtcattggacaaatgaagatgaaccaggcttatcagtatatgaaaaatcaaaattgttagctgaaaaggcagcgtgggattttgttgagaatgaaaatacaacagtagaatttgccacaatcaatccagttgcaatttttgggccatcattagatgcacacgtttcaggaagctttcatttattagaaaatttattgaatggttcaatgaaacgtgtaccgcaaattccgttaaatgttgttgatgtgagagacgtagctgaactgcacattttggcaatgacaaatgaacaagctaatggcaagcgatttattgcgacggctgatggacaaattaatttgttggaaattgcaaaattaattaaagaaaagagacctgaaatagctcaaaaagtttctactaaaaaattaccagactttattttgagtctaggtgctaaatttaatcatcaagctaaagaaggtaaacttttattagatatgaaccgcaatgtaagtaacgaacgtgcaaaaacattacttggttgggaaccgattgcgacacaagaagaagcaattttagcagctgtcgatagtatggctaagtatcatttaatataatacaaaacaccgtccataagtaagtggctttcctcttgataaaaggggcattcactcaatatgtgacggtgttttatatttctacgttaacactattgctgttctttttgacggccttttaataaaattgttgtcgcacctacgataataataaatagaatcgcaccaaataatcccatatattttactgcgttaccgaacacgataccgacagctaaaaagtctgtatctgagaatgttgttgcagcaccacctaattcgcctaaaaatggcaagaataataatggtaaaaacgtgattaggataccatttagagcggcgccagcaatagcacctttaataccgcctcttgcattaccgaatacagcagccgttgcacctaagaagaagtgtgcaactacgccaggtaaaatgacgacgccaccaaataagaataagataaacataccgatgacacctgtaataaagctgacaaagaatccaattaatactgcattttgtgcataagggaacacaatagggcagtctaatgcaggtttagaatttggtacaagcttttcagaaattcctttaaatgctgggacgatttcagctaagattaaacgaacgcccgttaaaataataaatacaccagcagcaaatgtcacaccttgaattaatgaaaagacaataaagttttgaccatcactaatagattcgtgtacataactaacgcccgcaaataagcatgcgatgaagtaaagtaatgccatcgtaatcgagatactaattgtactttctcgtaagaaacttaagccttttggaaatttaatctcttccgttgatttagacttacctttgaataattgacctacagcacctgcggcaaagtaactgattgagccaaaatgacctaaagctacttggtcattccctgtaatttttcgcatcgtaggttggagtaatgcaggtaatactgccatgattaatcctaatacgagtgcgccgataacaatcgttagccagcctttaatatgactgactgttaaaatgattgctaaaaacgcagccatgtaaaatgtatgatgacctgttaaaaagatatattttaaattagtgaagcgggcaattaaaatattaacaatcatgccacagaccatgatgagtgcagctgttgttccaaaatcttttaaggctagtgagacgatagcttcgttgttaggtacgataccttgcacaccaaatgcgtgttggaatattttgccgaatggttcaagagatcgaacgacgacatcagcacctgcacttaaaattaagaagcctaatatcgttttaatggttcctgaagtgatcgttgcggcaggttttttctgaacgattaaacctataaaggcaatcagtgcaacaagaatggctggttgacttaaaatatcgactataaaattaaggattgcttgcataggtcgtacctcctttaaatcatgttaagttgttgtaatttttctgagagcttttgttgtaattcagctttatctaaaatattatcaagaactaagacatcccctagacgttcggcattttcagctaaatctctaccacaaataaacaagtcagccatctctggacttgctgtcataatgtcactatgttcaacttcgatatcagatggtgcattaagttgcctaagtgcttcttgtgcgttcatttctaccataaaactacttcctaaaccgtggccacatactactaaaattttcatattaatcatgctcctttaaaatgtttttaatgtcttgtgcatttgttgcagttaatagttgctggactgtttggttatcgcccagtacggttgctaaattttgtaatacagataagtgtgaatgattgtcgatggcactcaatacaaaaatgagagatgcgtagtgatcttcatcacaaaatgccacatgttgattcaactttaatagacttaaaccaacttgatgtacgtcattgttcggtcttgcatgtgcaattgcaatttcaggtgcgataacgatataaggtccaagttcattaacgctatcaatcattgcttgaacatagccttgttcaataatttgttcttgtagtaatggctgagaagctatagttatagcttcagtccaatcatttacttgttcttttacaatgatgcgtgttgttgacaaaatgtctaatgacacgttattaagcctcctttgtcatagttaaagcaatgtgttgtttaattttaaaaatattcccatctaagaaatcttgtcgatataagtcgttgcttaagcattcgcttaactgtcccaatgcctttaaatgtgcattggggtggtccgttgctaatgtaattacaaggtgaacgggatcgttagctttactaccaaagataatcccttcagtgaaatatgttagtgcgaaacctacaccattctgtacataatcagtaccagcgtgaataagtgcaatatgtggactaatgaccatatatgacccgaattgttcaaattgttttaaaattgcagctgtataatttgaatagacaatgccatcattgattaaaggttgcacagccactgcaattgcggattcaattgataatggttgtttatttataatgatgcgatgttcaggcaataaatctgcgagtgacttgccatcagttgccattttcatgactcgttgttctcttgagtcattgataatttgattcaatttttgacgagattgttgattgataaatggatcgacatgaataactggtacagctgatatttcacaaggtactgttgaaatgacataatcaatgttatcttgcaataatcgactttcttccaattgataaatggaataggcatcccaaatgtgaaactcaggatacaggtgatttagttttgattttaaaagttgtgacgtgcctataccagaaccacatagtaagacaaccttaatcattgattgtttatgtgttgcaacacgctctatacttgatgcgaagtgaattgtaatgtatgttaattcatcttcgttgaagcgaatagcagcatcttgttcaattggactaatatgcttgctaacggcttcaatgatttgaggatagcgacgcataacttcttgcctcaaaggattaggttgtagcatatcgtatttaatacgatgtatagctggtttgatatgtgtgatcagactggtatgtaacttgttgtcttttgacatatcaatgcctaattcttggctaacacaagtgatcaattcatgtatattttgcgataaatcatggtattcaaaggtaattgaagatgctgtatgttcagtcattttagagcctagtaaatgtaacgtgataaagataatttcagactctggaaatgtgacattacaactgcgttctaagttttctatcatttttgaagcaatagcatactgattagtatgtcgccatttatcaatttcattgataggtatatcgaacgaaaaattttcatttaaacgctgaatggcaatgagtatatgatagattaagccatcgatagccgactgaactaaatgataattttcactatttaatgtcttaataatggcacggcgaaccaatgcgattgattctgaattaaagatatccgcctctataaaaggtgcagcttgtttcatatattgatgtataaagtgtgcatacgctttacgataatgatcttcctcaccaataatattgaatcctttattgtggacataatttaactttaaatggtattgatctagttgggcttgaatcattttaatatcatctgcaattgtccgacgcgaaacattaacatcttgcgcaagttgctttgttgaaacaggatcggttgtttcgaataactttaaagcgatatgtgtgagtcgttcatcttttgaaaaatgaatttgatttgttagattgtgctctaattcatttaatagtgtcgcgtgagctgttgttactttgatgcctgcagctttattacggctgacttggtaatgataagtttcagcatattgctcaatatatgctatatcatattgaatggtacgaggtgatacaccaagttgattagcaatggtattgattggaataaacgtttgctcatgaattaaaagatacaaaatttcgatttgtctataacttaacaacgtaatatcctcctatttgtaattgtaagcgatttcttaaaaacgtagatatgcaatctctttcatattttaatccgaaaaattgcatatcaaaatgtttatggcgcaagattttataggaacttttaaaataaattagatattcatgttgacaatttaaaaatgtcgcagtatatttagttagacatctaacgaaatggtggtgcaataaatggaattcacttattcgtatttatttagaatgattagtcatgagatgaaacaaaaggctgatcaaaagttagagcaatttgatattacaaatgagcaaggtcatacgttaggttatctttatgcacatcaacaagatggactgacacaaaatgatattgctaaagcattacaacgaacaggtccaactgtcagtaatttattaaggaaccttgaacgtaaaaagctgatctatcgctatgtcgatgcacaagatacgagaagaaagaatatagggctgactacctctgggattaaactcgtagaagcattcacttcgatatttgatgaaatggaacaaacactcgtatcgcagttatctgaagaagaaaatgaacaaatgaaagcaaacttaactaaaatgttatctagtttacaataaatgataagtgtgactggtagaaatcagtcactttgtctttaatattatagttagatatctaattgttagtaagctaattattggaaaagacaaggagtattgaacaatgaaagacgaacaattatattattttgagaaatcgccagtatttaaagcgatgatgcatttctcattgccaatgatgatagggactttattaagcgttatttatggcatattaaatatttactttataggatttttagaagatagccacatgatttctgctatctctctaacactgccagtatttgctatcttaatggggttaggtaatttatttggcgttggtgcaggaacttatatttcacgtttattaggtgcgaaagactatagtaagagtaaatttgtaagtagtttctctatttatggtggtattgcactaggacttatcgtgattttagttactttaccattcagtgatcaaatcgcagcaattttaggggcgagaggtgaaacgttagctttaacaagtaattatttgaaagtaatgtttttaagtgcaccttttgtaattttgttcttcatattagaacaatttgcacgtgcaattggggcaccaatggtttctatgattggtatgttagctagtgtaggcttaaatattattttagatccaattttaatttttggttttgatttaaacgttgttggtgcagctttgggtactgcaatcagtaatgttgctgctgctctgttctttatcatttattttatgaaaaatagtgacgttgtgtcagttaatattaaacttgcgaaacctaataaagaaatgctttctgaaatctttaaaatcggtattcctgcatttttaatgagtatcttaatgggattcacaggattagttttaaatttatttttagcacattatggaaacttcgcgattgcaagttatggtatctcatttagacttgtgcaatttccagaacttattatcatgggattatgtgaaggtgttgtaccactaattgcatataactttatggcaaataaaggccgtatgaaagacgttatcaaagcagttatcatgtctatcggcgttatctttgttgtatgtatgagtgctgtatttacaattggacatcatatggtcggactatttactactgatcaagccattgttgagatggcgacatttattttgaaagtaacaatggcatcattattattaaatggtataggtttcttgtttactggtatgcttcaagcgactgggcaaggtcgtggtgctacaattatggccattttacaaggtgcaattatcattccagtattatttattatgaatgctttgtttggactaacaggtgtcatttggtcattattaattgctgagtcactttgtgctttagcagcaatgttaatcgtctatttattacgtgatcgtttgacagttgatacatctgaattaatagaaggttaaatatttcgtccacttctggctgagtatatttcggtcggaagtgtatttttcgaaaaaaataaatatatgatacgattatgaaaaaataaagtgagattggcatatgtgtaaatctaaaatactgttgaaaaatatttttagtgaagaatcagaagttaaagatttaactgaagaaaaatataatcaagattacgaagcattaacatttagctttaaagaggaaacatatcaaagtaggttagctaagaaaacaccgactaaatcgggatatttcgtgacatgttggacaaaagacgaagataattataatcggccatacaaaattgaagagtttgctgattacctgattgttgctgttatcgatgatgaattaaatggctactttctatttcctagggaattattggtagaaaaaggtatcttagcttcatctaagtatcaagggaaaatggcttttagagtttatcctaagtggtgtaatcaattgaataaaacagcagggcaaacacaaaagtggcaatgtaaatatttttttgaatactaataaaaagtcatatggttgaacttataagagatgaatatatcatctttcgataagataaccatatgactttattttttatcatttaatgatgaacggtttcttgtcctactttattccaagtgaggataaagctcaacattgcaaacacactaattgctgttaataaaataaaaccgacatcccatccgaatttatcaactacagcacctaagacgatgttggccattacagcaccaaacagataaccaaataatcctgttaatccagctgctgtgccagctgcttttttaggtacataatctaatgcttgtaaaccaattaacataactggtccatatattaagaaaccaatggcaattaatgagacattgtctaaccaagcattgcctggaggatttaaccaataaattaatacaaatactgtgacacctaacataaagaagaaacctgcaggtccacgacgacctttgaataatttatcagaaatgtaaccacataataatgtaccaggaattccagcccattcgtataagaagtatgcccaacctgatgcttttaagtcgaaatgtttttcttcacttaagtagactggcgcccaatcaagtacaccataacgcacgaaataaacaaatatatttgcaaaggcaattgcccatacccatttattgttcagtacatatttaaataaaatttcttttgtagttaattctgtttctaatgttttcttatcgcttgtagcaaagtcatttttataaatttcgattggaggtaaaccttgagattgaggtgtgtctctaatcaatacgtatgaaattgcggcaatgataagtgctaagagtgcagggtaaatgaatacaccttcgaaaccttttaaataaccaaagttgataaatgcagttgttgtaataccccaagcagcaataggtgccataatacctccaccaacattatgcgcaacgttccaaagggcagtcttacttccgcgttcacttacactaaaccagtgaacgagaacacggcctgaaggtggccagcccataccttgaaaccatccatttaagaataataggacaaacataataccgatacctgatgtaaagaacggtacaaatcccattaacaaattgacgatagcagtgagtgctaatccaagaactaagaatatccgagcattgctccgatcacttacagtacccataaagaacttactaaatccatatgcgatggaaacagcagaaagtgcaaaacctagttccgcttttgtaaaaccttgctcttgcaatgccggcatcgctaacgaaaagtttttacgtaataaatagtacccagcgtaaccgatgaaaataccaagaaatacttggagacgtaatcgtttataggtatcatctatctgattttctggcaaaggcttaatatgctttgcaggtttaagaaaattcataaaatcctccttaatatgtatttatatgcattttgtgcgataaacttatattagacatgtatgaaagcgttgtcaatatgcttttgtgaaatcttgcatatttagttattgaagtattttataaacatttagaaaaaataaattgctacacataaatttataattatgcaattattatgtcgttatacatactagctgtgtatctacgaatgagtacaaacatatttttatttgcaaggggtaaatggcatataactatcttttttatgtaagctggtataaaatttatactaataggagggatagtatgaatatagtagggcatcatcacatatccatgtatacaaaagatgcaaaacgtaataaggatttttacacaaatgtccttggattacgattagttgaaaagtcggttaatcaagacaatccttcaatgtatcatttgttttatggggacgaagtaggtacagccggaacaattttaagcttttttgaaattcccaatgcgggtcataagcagccaggtactgaaacgatttatcgattttcattattagtaccaaatcaagcggcacttcattattttgaaaaacgtcttgagaataatggtattaagtctgaacgtttgtactatcttggacaagaaggtgttgtctttaaagatgaagacgacttagaaatcatattgcttgttaatgatagttttgaagtaccacatcaatggcaacataacgcttatagtgaaatacctcaagcatatcaaattttaggaatagggccagtcgaattaagagttagaaatgcagcgcgtacggtagaatttttggaaaatgtcttaggttatcgcaaaagagataataaatcattcgatgtgctgacattagcaccacaaggtttatattcggattttgtagttattgagcaacagggacaacgtgaaagacctggacgaggttatatccatcatattgcagttaatacaccacaaatgagtgacttagatgcaatttacaagaaattacaacaacaaccacaaagtaattcaggtataattgatcgctatttctttaaatcattatactatcgccataattcaattatgtatgaatttgcgactgaagcgcctggatttactattgatacacctgttgaacaattaggaagtcaattgaacttgcctgactttttagaagcagaacgtgaacaaattgaaagtaagttacacgaaatataaaggagaatgtttaatggccaaattagaaatgaataaaaatacgcctcttgagtttggtttgtattccttaggtgatcatttattgaatccattgaaaggtgaaaaagttagttatgagcaacgtattaatgaaattattgaagcaagtaaattagcagatgaagcaggtattgatgtttttgcagttggtgaaagtcatcaggagcattttacaacacaggcacatacggttgtgttaggtgcaattgcccaagcgacaaagcatattaaagtttcaagttcttcaacgattattagtgcaacagatcctgtaagagtatttgaagacttcgcgacattagatttgatttctcatggtagagccgaaattgtagctggcagagcatcaagaacaggtatttttgacttgtttggctatgatttaaaagactatgatgaattgtttgaagaaaaattaggtttacttttagagttaaataaaactgagcgtattacttggtctggaaaatatcgtccagaacttagaaatatgaaaatattcccaagaccaatcgataatatattgccaatatggcgtgctgttggtggtccacctgcaagtgctattaaagcgggaaaacaaggtgtgccaatgatgattacaacccttggtggcccagcaatgaactttaaaggttctatagatgcttatcgtcaagcggcaactgaagcaggtttcgatgcttcgcctaagtctttaccagtaagtacagcgagtctgttttatacagctgaaacaactcaggatgctatgagagaattttatccacatttgaatacagggatgtcatttattcgtggtgttggttatccgaaacagcaatttgctaattcgtcagattatcgagaagcgctaatggttggaagcccgcaacaaattattgaaaagatattgtatcaacacgagttgtatggtcatcaacgttttatggcacagcttgattttggcggtgtgccatttgaaaatgttatgaagaatattgagttaattggcaacgacattataccggcgattaaaaagcatttatcaaaataggaggggcgtcatcatgaatattgtattattgtcaggttccacagtaggttctaaaacgagaattgctatggatgatttaaaaaatgaactagaagtcatcaatgagggacatcaaatagagttgatggatttacgagaacttgaattagaatttagcgttggaaagaattatctagatactacaggagatgtatataaattaacgacgtcgttaatgcaggctgatgtgatttttattggttttccaatttttcaagcttccatccctggtgctttgaaaaatgtgtttgatctacttccagtcaatgcgtttcgtgacaaggtaataggacttgtagcgacagcaggttctagtaaacattatttaattcctgaaatgcatttaaaaccaatattgagttacatgaaagcacatacgatgcaaacgtatgtatttattgaagagaaagatttttcaaatcaacaaattgtcaatgatgatgttgtatttcggttaaaagcgttggcacaatccacaatgcgaactgccaaagtacaacaacaagtgtttgaagaagaaaacaaccaatacgacttttaaagtataaaaataagacgctcggcacactaaatttgtaagtgtttgagcgtcttttcatattaactatatagccaatgaacgacgataaaggcaagtgatgacaagcatattgaggtaataatgattgtcataagcggtttaagtgcgcgatttttaagatctttaaatgcaacatttaaccctaaagcaaccatggccattaataagcaaattgttgatacagtatttaaaatatttagcaatgctgacggaatagttacatatgtattcactaaggccataatgacaaatccaattaaaaagtatggaatgcttattcgacccttgttagatgattctgatgaacggaaacgcataattaaaataagtacgatggttaatggaatcagtaagaatactctaccaagtttaccaagaagtgcaattttaagtgcatcactaccaccaaagccaccagctaagacaacgtgtgcaatttcatgaagactaacaccagaccaagcgccataaacatttgtcgtcattgaaaagatagcgtagatagctgtatatataagtgaaaatatcgtaccaatcaatgcgatgataccgatactaatagctgtatccttttcacgtgatttgaatattggagcgactgcggcaatagcagcagcaccacaaacgcctgtgccgacacctagtaataatgcgatgtttttgtcaccatgcaacagtttgttgacaaagagcatcattacaatactgaaaataacgacacctacatcgatggctaatagtttactaccttgaccgataatatcgaatatattgagtttaagtccatataggatgattgcaaatcttaataaatatttagatgaaaacgtaatacctgagctatattgttcaggatatcctctaaagtgacgatatagaatagcgattaatatcgcgatagttaatgcgccaaccttatctaggattggcaatttagctgctaaaaagctaaataatgcgactataaatgttagtgatagcccaatcataaaatgcttatttttcaatgatgccatgagcagtgcctcctttaatagcattttagcactgttttgtcgtatttttaaatataaatttggaatgaataataaagtagtgattaaattaagttgtgtgataggaaacttggacatcaatcaaagtaataggcactacaacgcttattggcggggccccaacaaagaagctgacgaaaagtcagcttgcaataatgtgcaagttggggatgggccccaacatagagaaattgggtccgtaatttctacagacaatgcaagttggcggggccccaacatagagaatttcgaaaagaaattctacaagcaatgcaagttggggaaggacaacaaatttaagatacaatgcgtaacattaatatgttattataatgataatttacagaattatatgaaaaatgaatgaggatgtgatggtatgtttggaatgaaagtgaatgaacaaataacattaaaaattttagaagctcatgacacagaagcgcttttcaatttagtcaatcgttcaagaaattcacttagggaatggttaccttgggtagatgcaactgagcaaccatcagatacgcgtgcatttattaaaagaggacttttgcaatttgctgatggtaatggatttcagtgtggcatttggtatgaaggaacgctagttggtgtcatcggtttacatgaaattaatcacatgcacagaaaaacttcattagggtactatttagataaagaatttgagggtcatgggattatgacacaagcagttgaggcattgataaagtattgtttcgaagagcttgacttaaaccgaattgagattagtgccgcagttaataatgaaaaaagccgggctattcctgaaaggctgggatttactagagaaggtatgttacgtgacaatgaattactaaatggtatttattcatcgagttacatctatagtttattaaaatcagaatacgaccaaaaatgacaaattagacttacaaaagagtgatgacatttaaaatggcagcgctcttttatttaatttttgaaaataaaaggttgttgacagtattattttataacaatataatgattttgataattattatcaactagatgatgtttatgggaggatgctttaaaacagccgttttaagtgtaatgtattattttagcgtgtagggaatgcgaaaataatatttataagaacacatctatggggataatagaatttctataatgaggtgtcaaaatgaaaaagttaacaacgctattattagcatcaacgttattaattgctgcatgtgggaacgacgatagtaagaaggatgattcaaagacatcgaaaaaagatgatggtgttaaagcagaattaaaacaagcaacaaaagcatatgataaatatactgatgaacagttaaatgaatttttaaaaggtacagaaaaatttgttaaagcgattgaaaataatgatatggcccaagcaaaagcgttatatccaaaagttcgtatgtattatgaacgctctgaaccagttgcagaagcatttggagatttagatcctaaaattgatgcacgtcttgcagatatgaaagaagagaaaaaggaaaaagaatggtcaggatatcataagattgaaaaagcattatacgaagataagaaaattgatgatgtgactaaaaaagatgcacaacaattattgaaagatgcaaaagaattgcatgccaaagctgatacattagatatcacaccaaaattaatgttacaaggttctgttgacctattaaatgaagttgcaacttctaaaatcacaggtgaagaagaaatttattcacatacagatttatatgattttaaagcgaacgttgaaggcgcacaaaaaatttatgacttatttaaacctattttagagaaaaaagataaaaaattaagtgatgatatccaaatgaacttcgataaagtgaatcaattattggataaatataaagataacaacggcggttatgagtcatttgaaaaagtatcgaagaaagaccgtaaagcatttgcggatgctgttaatgcattaggagagccactaagtaaaatggctgtgattactgaatgacaaattatgaacaagttaacgatagtacgcaattttcaagacgtacatttttgaaaatgttaggtattggcggtgccggtgttgcaattggcgcaagtggtgttggtagcatgtggtctttcaaatcaatgttcaatacaccagaagatccggaaaaagatgcgtatgaattttatggtaaagtgcaaccaggcattaccacacccacgcaaaaaacatgcaatttcgttgcgttagatttgaagtcaaaagatagagatgcaattaaggcaatgtttaaaaagtggacggttatggctgatcgtatgatggatggtgatacagttggcaagccgagtaacaatcctttaatgccaccagtagataccggtgaatcgataggattaggtgcaagcaagttaacgattacctttgggattagtaagtctttgatgaagaaaattgggttatctagtaaaattcccgatgcctttaaagatttaccgcattttccgaatgatcagttaatagacgattacagcgatggtgatattatgattcaagcatgctcaaatgattcgcaagtatcctttcatgcggttcataatttagttcgtccatttcgagatattgttaaggtacgttgggcgcaatctggttttatctctgctaaaggtaaggaaacacctagaaatttaatggcatttaaagatggaacaattaatcctaggaagaataatcaacttaaagattatgtgtttattgatgacggatgggcgaaacatggaacttattgcgttgtcagacgtattcaaatacacattgaaacgtgggatcgtactgcgctggaagaacaagaggctacatttggtcggaaacgacatagtggtgcaccgttaacaggtgggaaagagtttgatgaaattgacttaaaagcgaaagatagtcatggcgagtatattattgataaagatgcccatacgaggctagcgaaagaagcaaatacgtcaattttacgtagagcctttaattatgtggatggtacggatgaccgcacaggtaacttcgaaacaggcttactttttattgcttttcaaaaagcgacaaaacaatttatcgatatacaaaataatttaggtagtaatgataaattaaatgaatatattacacatagaggttctgcttcatttttagtattaccaggtgttagtaagggaggataccttggtgaaacattatttgactaaatttgtagcaatgctaataactgctgctatggtgtgtagctttgggttactgaaaagtcaggcagcagaacaacaaagtattagtgatgtatatagtgtgataacggatgcgaaatctgcactttctaataattcgatatcgaatgacaataagcagaaagcaattgagcaagtggtaagtgcagttaagaaattatcgcttgaagataatagtgaaagtaatgctgtcaaatcagatgtgagaaagcttgaagatgcaaaagcgaatgataatcaaaaagatacactttcgcaattaacgaagtcattaattgcttatgaagagaaattggctagtaaagatgcgggttctaaaattaaactattgcaacagcaagtcgatgctaaagatgctgcgatgacaaaagcgattaaagataaaaataaagcggaattagaatctttgaacaatagtttgaatcagatttggacaagtaatgaaacagtgattcgcaattatgacgcaaatcaatatggacaaattgaagtcgcattattacaacttagaattgcaattcataagtcaccattagatacggcaaaagtgtcacatgcttggacaacttttaaatcaaatattgatcatgtcgataaaaaaagtaatacgtctgcaaatgatcaataccatgtatcacaattaaatgatgcgttagagaaggcgattaaagctatcgacgacaatcaattgtcggatgctgatgctgcgcttacacattttatagaaacttggccgtatgttgaaggtcaaattcaaactaaagacggtgctttgtatacgaaaattgaagataaaataccatattatcaaagtgtattagacgaacataataaagcacatgtgaaagatggtttagtagatttaaataaccaaattaaagaggttgttggccatagttatagcttcgtcgatgtgatgattatctttttacgtgaagggctagaagtgttgttaattgtaatgacattgactaccatgacgcgtaatgtaaaagataagaaagggactgcaagtgtgattggtggtgcaattgccggacttgtactgagtattatcttagcaattacgtttgtagaaactttagggaatagtggcattcttcgtgaaagtatggaagcgggattaggtatcgttgcggtcatattaatgtttatcgttggtgtttggatgcacaaacgttcaaatgcaaaacgttggaatgacatgattaaaaatatgtatgctaatgcgattagtaatggtaatttggtattgttagcgacgattggtttaatatctgtgttgcgtgaaggtgtcgaggttatcattttctatatggggatgataggtgagctagcgaccaaagattttattattggtattgctttagctatcgttattttaatcatctttgcattattatttagatttatagttaaattaatacctattttctatatatttagagtgttgtcgatctttatttttattatgggattcaaaatgcttggcgtaagtattcaaaagttacaattattaggtgcgatgccaagacatgttattgaaggattcccaacgattaactggttgggcttttatccaagttatgaaccattgatagcacaaggtgcttatattatggtagttgctatcttaatctttaaatttaaaaaataaaaaacaggccgagtgcctgttttttttgttgctatattggaaatattcggtattgcagtataacgataatcacagcattgattcgtataaggttaatgtgttggcggtttgcctcggcatgtgaacttaacgatgaacatactgaactcaaagagcaatatgagtggcaatgtgagtaatatatttaatgttaaatcgggtggtgcaatgatacttgctaatacaaagcaagcgaaataaatatatttacgataatgtttcaatgatgtggtatctataagaccgaattttgcaagacccataaataatattggtaattgaaatagaagaccaaatgtgaataaccaacgtatgagttcaatcaaatatgctttaaagccaatgacaggcgaaatgtttaaagttaatgataattttaacgcgaattgaatgatcattggaaagccaacataaaatgcaaaagcgacgccagcacagaataataacacgctgaaaaaactatatttataaataaattgacgttcattattatgtaatccaggtgcaatgaatgcccacaattgataaaacatgactggtgaaatgaaacaaaacgcgatgaaaaatataatcatcacgtatatttgtatcatttctgtgaatgaaaatgcatgtaaggacacatgtgcacgggtaatatacgttatgaatggtgtcatccaccaaaatgatgaaacatatacgacgatgaccgtaatgacgaacgacaataaaatttttactaaccgatggcgtagttcgctaaagtgaaccagtaaggtgtggtcagtgctattgctctcgctgttgtttcgattccttactgggtgtatcgtgagactctttatctaaatcttctgttgcagatttaaattcttttaaagtagaaccgatggcacggccaaattgtggtaattttttcggaccaaaaataattaaagcgataatgctaatgacgacaagacttgttgggcctgtgatgcctaaaataaaagtgttagttatcatgataatcaacctcactcataagtagtatatagtatttactttataccgaacgataatgattatcaataaaattttatgaaataattaaaatgttgctataaatatagtttattgagggattaattctgaaataacagcttggtcttgcaagtcgatataagtacaagtgcccgcttgaatatcgatatgccatttataaatgccagcttcagccatttcatcacaaaatgtttcaaaatctgtttgcccttgttgatgtctagttaagacgtcttgaactattgttttgtttgatttttgagcaacaggatgattactttttacagatgacgtaacgatatcatcttctgattgatgtacgtatgttgcagtgccatcttgaatgttgacgatattgtaagtcatccccatatctttaaaagctttgaatagttttggaaagtcaacaccagtaaattgttgatgtgcttgttgaattgcagataatgtaaatgccataatagtctcctttgaatggtttgatttagtgaaaatgcgtgcatcatactaaaattagaatgctgttaattatgcaggaaggtgtaacgaaagtaaacaattatgacttgtaggcgttgaggtgtttgtttcaaaatgtcatacataggtggataatcatattttttggtgtagatttgacaaatatagttgtcaaaaagacgcatatcatttacagtgtaattaaggagttgatgcgatgtgcgtaatcgattgaaagaattacgagcacgagatggcttaaaccaaacgcaacttgctaaacaagcgggcgtttcaagacaaaccatatcgctaattgagcgaaacaattttatgccatcagtattaacggcaataaaaattgctcgcattttcaatgaaacggtggaaactgtttttattattgaggaggatgaggcatgaaaatactaagatatatcggatatcttttactgggtggacttgtagggggtatcataggtggaattttaggtaattttgatggatttggtattgagaacttgacgtttgcgacatataacaatgtcgttgtaatatcgattgttgcgacgattattatcatattggtagaagccattgttttgatgaatcaaagacgtgcattgaagtataagcaacttgtagataaagaggtagatatcgatgcaacagatcaatatgagttgcttgcgaatcgttatgttttaaatggaagtatattaagtattctgcagacagttattgcttttttagtattgcttatttttgtggtagggcacgctgcagcaaatgcaatactattctttttaataccattttttgctagtgctattttcaatacacaatttacactgtttaatagaaggtttgatgacagaataccaaaaattgcagataagaattacactgaaaagcgattggaaatattggatgaaggtgaacgccatatagaattaattgcattatttaaaacatatgcgatcaacttatcaatattgatactagccattgtagtaattgggctttattcaattactactggaattaatcaaagctttagtttgctacttatcattgctattttcatatataacgcctttagttatttattgaagagaagacgtttttattaaaattaaacaaagaggagcatggatatgacaacattgttaaacgtagatagtgtgaacaaacaatacaaagattcggattttaaattgcaagatgcatctttaacgatttctactaatgagacagttggattaattgggaaaaatggctcaggtaaatcgacattaattaatattctagtaggcaatcgacataaagataacggtagtatcacattttttggagaagaacataccgtggatgatgtcgaatataaagaacacataggtgtagtgtttgatgatttgagagtgcctaataaattgactattaaagatattgataaagtatttcaatctatttatatgacttggaatagtcaaaaattctttgatttaatcaaatatttcgagttaccactacaaactaaaattaaaactttttcaagagggatgcgaatgaagatagctttaacgattgcgctttctcatgatgtgaagttattaatcttagatgaagcaactgcaggtatggatgtttctggaagagaagaagtaatggaaatactagaagattttgtcgcacaaggtggaggcatcttaatatcatcgcatatttctgaagatatagaacatttagctgataaattagtgtttatgaaagatggacgaatgattttaactgaacagaaagatatacttttagcacaatatggaattgttacgacagaagataaagatgttgaaattcctaagcatttaatcattgcttctagattgtcaaaggggaaatatcaaattttagttaaagattatgcagaaattgaaaatgcagagcctttaaaacacattgatgacgctacaaaaatcataatgcgaggtgaagtataatgaaaggtatgttcctaagtagtttttatgcaacgagaaagcaaacatatatttattttatagtcgctattatagctgcaggatactttgcagtatttaatccgttgatgagttcggcaatggctggggttatgttaatcacacctattactgataatattaaacatgaaaaagactcaagatggatgtattatgtatctactttaccggttaaacgtagtgattatattaagtcatactttgccttttatttaatcttattcggtgcaagtttaatgattggattagttgtgactacgattgtgacccaaagtgtgatgattggtattatgtcaggtttaatgagttttggtatcataggggcatactctatcattttcccattgacatttaaatttggcgctgaaaactccaatgtcattatgatatgtgcatctatactactacttatttctttcgtggtctttttctttatatatggtatggttagtggtgcatctgcattagaatttgaaaaaattagcactgaaggatggctagttgtcatagcatatgcggtcattggtatagttataacgagcgtttcttatatgttgtctattaaaatttttaacaaacaagaactataattgtcgattttggtgatgatagtatttgaaataatatttagagcaggtgataaatctttacgattgtcatctgttctttttggtgtggaatgaaatgtgggggataagtataggtgacatatctatattgatttatttgttttgaggtggttatgttgtgtgggaattatttccttttagatagcggggattagaggatatatgttatttataagtatcatttgatgattgtataggctaacgatttcctcggaaatatttaaaaacctcgatcatgtagcataactgaagtttgtcacaaaagtataatgtgaagttcgacacttttggattcagttcaaatactttgaccgaggtaaatactatttattcatgtttattacgtagacgttgatttttaaaataaatcagcatgatgcagaaggttgcaactgatactgagataatcattacatggtcgtgacctttaaataaaaggctgacaatataagacataacgagtatacctagtgaatatgaaatatacttcgcgtttgtcagttcattatggaaataaggcgtgattaaccataatccaatatagaatattaaaacactgatatacatcatattaatttcaaacaagtcatttagtttattgttattactaaaaacaattgcagcattaatcacacctaaagcgatattgattaatagatgcgtatacgataaacggaaaccgatagatgttaatttatgattaatataattttcagtaatgatccaatatacaccgaaaagactaattaaaatcataaattggaatatataaatgtaactaaaatgatcaatgctaaatgatgacgaagctaaaccaaccagtacctcgccaaagataataattgttagtaacgaaaaacgttctactaaatgcatcatattaacaggtgataatacaagatatttctgaaatggaataagtcctgtcgctgcaatgaatacgcctaaaaatccagggatgtaatggatactttgtggtagtactaatgatagaaatgataaaaatgaaatcacaaaggctacgctcgcaaaagcttgacatgtacgcttatcgccataatctaaccctgtacgtatatgtaataaatactgtaatccgatacttaaatacataattgccacgcataagaagaatgggaagaatgtcttttcaaagtccggatataggctgttagataggaagaccatgatgaacatattaaacatcataaacgagacgtctttgaatgtaacttgaccaaatcgatttgtaaaaaatgtttgatgagaccacattaaccataagaacaaactcatgacgatgtatttgaaaaataaatcagctgaaatggaaccgttttgtgttgttaaaatcacatgtgcaattttttgaatggcatagacgaaaattaaatcaaagaacaactcatggaatcctgcacgcttttcagctaaatgttttggtgttaatgcattaaccataaaattttaactcctttaagatgtgtaattaatttactaagtatactatttattttttctagtgaataggggcagatttggcgatgaagtggaaggagaggtgactgcaaggtaattgcggaattaacaatcatcagcgatttaatatttgactggagacgtcatggtaataaaaaattgatgagaaattgatggtgaaaccagctgtgaatagcgatgcaatgatagatagaatttaattagagtcattacgcgaaatgattaatgataatttgtggtaaatcaaagcataattttgtactatagatgaggatgatagagcatatttaagagggtgaaatgttaaagtgaaaccgtttacgtttccgattgcccaaacaaattacatcattgtataatatgatttgttaaatgcataacaagaatgaaaatgtaacatacgtagcaattggtttcataaattggatgttagtggcgtattggttcattagacgtattagtaataaaattgtatatatcataaggagatgaatatgacatgacgagagtcgtattagcagcagcatacaggacacctattggcgtttttggaggtgcgtttaaagacgtgccagcctatgatttaggtgcgactttaatagaacatattattaaagagacgggtttgaatccaagtgagattgatgaagttatcatcggtaacgtactacaagcaggacaaggacaaaatccagcacgaattgctgctatgaaaggtggcttgccagaaacagtacctgcatttacggtgaataaagtatgtggttctgggttaaagtcgattcaattagcatatcaatctattgtgactggtgaaaatgacatcgtgctagctggcggtatggagaatatgtctcaatcaccaatgcttgtcaacaacagtcgctttggttttaaaatgggacatcaatcaatggttgatagcatggtatatgatggtttaacagatgtatttaatcaatatcatatgggtattactgctgaaaatttagtagagcaatatggtatttcaagagaagaacaagatacatttgctgtaaactcacaacaaaaagcagtacgtgcacagcaaaatggtgaatttgatagtgaaatagttccagtatcgattcctcaacgtaaaggtgaaccaatcgtagtcactaaggatgaaggtgtacgtgaaaatgtatcagtcgaaaaattaagtcgattaagaccagctttcaaaaaagacggtacagttacagcaggtaatgcatcaggaatcaatgatggtgctgcgatgatgttagtcatgtcagaagacaaagctaaagaattaaatatcgaaccattggcagtgcttgatggctttggaagtcatggtgtagatccttctattatgggtattgcaccagttggcgctgtagaaaaggctttgaaacgtagtaaaaaagaattaagcgatattgatgtatttgaattaaatgaagcatttgcagcacaatcattagctgttgatcgtgaattaaaattacctcctgaaaaggtgaatgttaaaggtggcgctattgcattaggacatcctattggtgcatctggtgctagagtattagtgacattattgcatcaactgaatgatgaagttgaaactggtttaacatcattgtgtattggtggcggtcaagctatcgctgcagttgtatcaaagtataaataataagaaaacaggttatcacaacagtattaattacatgttggcataacctgtttttatttgtttatggatttattgggtaatattagtcatttgatggtttaattgcaaatgctctaacagggaacccaggtgcatcttttggtttagggctgatagcgtaaatgatggcgccacgagttggtaattgatctaaattagttaataactcgacttggtatttatcctgaccaagaatataacgttcgccaactaaatcaccattttttacaacgtccacagatgcatcggtatcgaatgtttcatgaccaacagcttcaacacgacgttcttcaattaagtacttcaaagcatctaatccccaacccggtgcatgttgttgtccgttcgcatctttgttttcaaacttttcaatattaggccaacgttttgaccaatcggtacgaagtgcaacaaaagtgccaggttcaatagtaccatgctctttttcccatgcttctatatgcgcacgtgttacgatgaaatcattgttgttcgctacttctgttgaaaagtctaatacaattaacggcaataccaattcttttaaatcaatgtcttctaaataacgtttattctcgacaaagtgaattggtgcatcaatgtgagtaccatattgcgttacaatattccaacgttgcacatagaaaccatgatctttaaccgtgaataaagttgaaacttcgcctttttcaaactcactaaaacgtggtatttccggatcaaatgtatgcgttaaatcaacccaagttgcttgttttaaagtatttaattgttgccataaaggatattgtgtcataaaatcacccgtttttagtttattatatgataaatgctgcgattattcttggcgtttagctttaacagcattcacaagcacagtcaatgcatctttaacttcttcttcttttcgcgtttttaaaccacagtcagggtttacccagaataatgagcggtcgatttgttgtagtgaacgattgattgctgtagtaatttcttcttttgttggaatacgtggactatgaatatcatatacacctagaccaatacctaaatcataattaatatcttcaaagtctttaattaaatcaccatggctacgagatgtttcaattgaaataacatcagcatctaagtcatgaatagcatgaatgatttgaccgaattgagaataacacatatgtgtatggatttgagtttcatcacgaactgaagacgttgcaagtttaaatgataaaacagcatctttaagatattgttcgtgatattcagagcgtaatggtaagccttcacgtaatgcaggttcgtcaacttggataactttgattcctgcagcttcaagtgctaatacttcttcgttgattgctaaagcaatttgatcttgaacgactttacgtggtaaatcaacacgttcaaatgaccagtttagaattgttacaggtccagttaacatacctttaactggtttatctgttaagctttgtgcataaactgtttcatcaacagttaaaggcgctgtccattttacatcaccataaatgattggtggttttacggcacgtgaaccatatgattgcacccaaccgaatttagttactaagaaaccttgtaatttttctccgaagaattcaaccatgtcattacgttcaaattcaccgtgaactaatacatctaagccaatgtcttcttgaattttaatccatcgagcaatttcattttttaagaatgtttcatatgcttcgtctgtaatgcgtttgttcttccaatctgcacggtattttcgaacttctcggctttgtgggaatgatccaatagttgttgttggtaaatccggtaagttcaaacgtttttgttgttgttcaatacgttgcgcgaatggtgattgtcttgaagtacgcacgctttcgaaatcataatctaagtttttgaatgattgattttggaaacgctcataacgtgcttttaatttatcatatttaacactatcgttttgattaaataggcgacgcaatgcatctaattcgtctaatttttcagttgcaaagcttaagccttcgccaacacttgtatctaatgtttcatcatctaaagatactggaacatgtaataatgaagatgatggttgaatgacaagttcattagtgtgtgctaacaatttatcgattaagacttttttagcttcaatgtcacttgcccatacattacgaccatcaataattccagcgtataatgtttttgatttatcaaaatctccagcttcaatttgtttaaggttatagccattatcatggacaaagtctaaacctataccaccaacaggtaaagaacttaagaatttaagatgtgcacgttcaaagtatgtttgaatgactaattttttagcaacaccagctttttcgaaatagtcataagcttcacgtgtaatattttcatagctttcgctgtcgtctgtaactaagattggctcatcaacttgaatgtactcagcacctgcatcaattaatgattcaaacacttctttataaagtggtaataacgttttaactttttcttcaaaagtttggtgaccgccttttgataatttaacaaaagtaatcggaccaacaatgacagggtgagcgttaacgtttaaagattgggcatatttaaagcgatctaataatacattgcgactcactttaggctcaacattgtcccattcaggtacgatgtaatgatagttagtgttaaaccattttataagtgcacttgcaacatggtctttattaccgcgagcaatatcaaataataaatcatcatcaatagttcttccttggaaacgttcagggatgatgttgaataataatgacgtatctaatatatggtcatataaagagaaatcaccaactgggatgctatctaagtgatagtacttttgtaataataaattttctttatgtagatcagttaatgtttgatctaattcttctttagaaatcttctttgcccaataactttcgatggcttttttccattctctttttctacctaatcttgggaatcctaagtttgatgttttaattgttgtcataatattgcctccttgtgagcagtaatagattttgagtatgctgcaagttctaatgaatcttcgacattttgaaacggtgtgataatgtataaaccattaaaatattcatgaacagtatcgattaaatcctttgaaagcttaagacttagttctcgtgttttggctttatcatctttaactgcttcaaattgttgtaaaatttcatctgacatcttgattcctggcacttcattatgcaaaaagagtgcgtttttgtaacttgcgataggcataatgcctatgaaaaatggtttgttcaagtgcttagtggcatggtaaatttcaatgattttctctttgctgtacacgggttgtgttataaaataagacattccgctttctatctttttctctaatcttttgacggcaccatataatttacgaacattagggttaaaggcgccagcgatgttgaagtgtgtacgtttcttcagcgcatcaccgtcagtgttaataccttgattaaatcttagagcgagttcagttaatcctttagaattaacatcatagacattggttgcacctggtaagtgaccaacttttgaaggatcaccagttatggctaatatttcgttaacgccaatgagcgataatccaagtaaatgggactgcaagccgattaagtttcggtctcgacatgtaatatgtacgagtggttcaatattgtaatattgcttaattaagctagcagcagcaatattgctaattctgacagttgccaatgaattatctgcgagtgttaccgcatctacattagctttatcaagtttagcgatattttcaaaaaatctatccgtgtctaaatgtttcggtgtatccaattcgataataacggttggacgttcttgaaccttagatgttaatgattgtctaactttattttgagatggattgaaaagtgctttcgttggtatcggaatcacttttttgtcattaacaggtttaagtgtctgaatagattctttaataaatttgatgtgctctggcgttgtaccacagcaaccaccaattaaacgaacaccttcgcgaattagattttgagcaacttgaccgaaatattgtgcattgtcactatacttaaattcactattttcaatatctaataagctggcatttggataacaagataagaatgcgtgctctggtaattcaatatgtgtgaaagactcttgcatatggtgcgggccatgatgacaattgagtcccacgatgtttgcaccacattgaacgagttgttttaatccttcattgattgcctgaccattaactaagtaatttgtgtttgaagcggttaattgagcaatgattggaatgtcgtatttctttctcgttcgtgaaatgacatttgttaactcttctaggtcgtaatacgtttcgaaaagtagcgcgtcaacgccttcttcaattaaggtgtctatttgaatttcagtatgataaagaatagtttgtaagctgatatcctcttgtttgatacctctaaacccaccaactgtgcctaatatatacgtatctttatttgctgctttttttgcgatgcgaacggcggcttgatgtattgctttaactttatcttcaagaccgaatcgttttaacttttcaaaatttgcaccataagtattggtttgaatgacatcagcaccggcttcaatatatgaacgatggatgcgttcaactttatctggatggctaagattatatgcttctggacaggtgtctaatccttcagagtataaaatggttcctatagcgccatcagctactaaaacattatctttcaattgtgtgaggaattgactcattgaatgcctcctttaatgcgtatttgatgtctgcaatgagttcatcaggatcttcgagaccaacacttaatcggaatagaccgaaagtgataccacgttcttgtctcacttcttcaggtagtgcagcgtgagacattgttgctggatgtgaaaggatcgtttcaacaccgcccagactcactgaaacgagtggtaatgtcagtgcatcgacaaattgttgtgctttagactcatcagctaaacgaaagccaataacggcaccgccatttttagcttgttctaaatgagcagtagtgagtcccggataataaacttctgaaatttcatcttgctttattaaaaatgacacgattttttgagcgttttcgacagattgtttaaatctgattggaaaagtttttaaatgtttagcaagtgtccagctatcctgagcagataacatattgcctgtaccattttgtattaaataaagagcgtcactaattgcctcattattagttatgacagcaccagcaattaaatcgctatgtccacttaaaaattttgtagcactatgaatgacaatatcagcgccaagtaataaaggtgattgacctaacggtgtcataaatgtattgtccacagctaccagtagttcatgcttttcggctattttagaaacagctttgatatcagtaattttaaaacagggattcgatggtgtttcgatataaattaattttgtgtttgattgaatggcaccctcgatttgttcgagctttgtagtatctacggttgtaaattcaatattaaatcgattcaaaatttgctcagtgaggcgaaaagtaccgccatatacatcatcgggtaagatgacatgatcaccagatttgaaagtcaaaagtactgctgaaatagcagcaatacctgatgcaaaagcaaaagcgaattttccctgttctaatcgtgctaacttctcttctaaaagttcacggttagggttgccacttcgtgcataatcatatttaacatcgccaccaagacttgtttgatggaatgttgaagaatcatagagtggtgggttagctgaatgatattccacacctctacgccaatcgaatatcacttctgtctcttttgaaagtgtcatacaatctctccaatctgagctttatctaatgcttggatgatatcgcgttcgatgtcttcataattttcaacacctagtgataagcggattaaatactcatcaatgccacgtttatctttttcagcatctggcatatcaacatgtgtttgggtgtaagggaaggtcactaatgtttcagtacctcctaaactttctgcaaaaatgcaaatgtctaaattttctaataatttagcgacgctataggccttgttaagtcttaaactaagcatgccagtttgcccgctatatagtacttcgtcaattgcttgaagtgactgacattttttagcaagttttctagcgtttgattgcgcacgctcaatgcgtaaatgcaaagttttaagtccacgtaacaacaaataactatctattggtgaaagtgttgcgccagtcatgttgtgaaaatcaaacaactgttgcgcgagtgattcatctttgacggttacgacacctgctagtacatcgttatgtccgccaatatatttcgtggctgaatgtaagactatatcagcaccttctgctagtggtgttgaaagataaggtgttaaaaaagtattgtcgataattgacaataagcctttagctttacaaagttgatagtatggctttacatcaatagcaatcatttgtgggttagatattggttcaatgaataatgcaactgttttatcagtgatttctttttcaacttgttcataatctgtaaaatcaacgtacttaaatttgatatcgtattgttgctcgtaaaattcaaataatctaaatgtgccaccatataaatcgaatgaaactaaaatttcatcatgaggtttaaatagattacatattaattgaatggctgacattccacttgatgtagcgaatgatgcaataccatgctcaagtttggcaaaacaggtttcaaatgttgagcgtgtaggatttttagtacgtgtataatcaaaacctgtcgattgtcctagttttggatgcttgtaggcagtagataaatggattggattcgctatagcaccggttgaatcatcggttaatgtgatttgggctaactgtgtatccttcatattaagaccctcctataagaaaaaataaaaaaagcttccgtccttcgtacccgaatgaatcggataaaaaggacgaaagcttatgtttcgcggtaccacctttatttgttattccatcgctgaaataaccttattcagtacgcattaaaagtaaatatgcttactgaacaattatcacaattaaagtcagtaagtaaggatatagtaatgtgctatcccatacttattaacaaaaaatcgtgcgtaaagaatccagtacgccatttaacatcaatgttaatactgtatcgctataacgggcgaacccgtagacacctcatattggcatcaacactccaaggccattttcaaacacgctttcaaaatcttctctcagctactaaagactctctgtataagcagggtgtgttttactttcctctttattgtgtttacgtttcattaaactgttataagatattaattagcttacagagtaaaaaaagatttgtcaacaattattcagaaaattttgatttaaaagttaatttgtttgtgaaattgtaattggtatcttgaagttgaaaaatgaattattttttaaataaagtgtggttaatggttgtctgactcatttagaatacataaaatatatttaactgttgttatcaaataaaaagtgatgtgagtgaattgtcaaaaagtgaagatcaacgtattactaaaacaaaagatgaacaaattaagcaaatagatatatcggatatcaaaccgaatccgtatcagccccgaaaaactttcgatgaaaatcatttaaatgatttggcagattcaattaagcaatatggaattttgcaaccaattgtgcttagaaaaacagttcaaggttattacattgtagttggtgaaagaaggtttagagcttcgaaaattgctggtctaaaatacgtatcagcgattatcaaagatttaacagatgaagatatgatggaactggcggtcatcgaaaatttacaacgagaagacttaaatgcgattgaagaagctgaaagttatcaacgtttgatgacagatttgaaaattacacaacaagaagtagcgaaacgattgagtaagtcgcgcccgtatatagcgaatatgttgaggttattacatttgccgaaaaagattgctgacatggtaaaagatgggcgactgacaagtgcacatggacgaacgttattggcaattaaagatgaacaacaaatgcttaggttagcgaaacgggttgttaaagaaaagtggagtgtcagatatttagaaaaccatgttaatgaattaaaaaatgtttcgtcaaagtcggaaacagacaaagtagatataactaagcctaaatttataaagcagcaagaacgacagttgcgagaacagtatggtaccaaagtagatatatcaataaaaaaatcggttggtaaaatctcatttgagtttgattcacaagaagattttgtgagaataattgaacaattaaatcgtaggtatggtaaatagttacacaattttatataataactctttgtgcaagtgtaaataaattgtaatcagtgaacatttgattctagatatattgagactttcgtaggttggaagtatataaaaatatgaatacaatattgatatatcatatagaagggagtaacgcttatcatgaatcaagtcatgaatattatttcatctctatttgagccattaacaaaaatagaaacatatgaaaacattgcaactaaaatcgctatgattgttatttatattatcgtagccctcatagttattaaaatactgaataaaatgattgaacagggatttaagattcaaaataaaagtaaaaagagtaacaaaaagcgctctaaaactttaatatctcttgttcaaaatgtagtgaagtatatcgtttggtttatagttattacgacgattttaagtaaatttggcattagtgttgaaggggtaattgccagtgctggtgtcgtaggcttagcagtaggttttggtgctcaaactatagttaaagacgtaattacaggattctttattatatttgaaagccaatttgatgtaggtgattatgttaagataaataacggtggtacaactgtagcagagggaacagttaaatcaattggacttcgttcaacacgaatcaatacaatttcaggagaattaacaattttaccaaatagtagtatgggtgaaataacgaactactcaattacaaatggtacagctatcgttaaaattccagtgtctgtcgaagaaaacattgataatgttgataaaaaactaaacaaactatttacttctttacgtagtaaatattacttatttgttagtgatccggttgttattggtattgatgctattgaagatacaagagtaatattgagaatatctgcagaaacaattccaggtgaaggatttgctggagctcgaattattcgcaaagaagtacaaaaaatgtttttacaagaaggtattaaaacacctcaaccaattatgactgcttataatcatagtgaaaacggtgtttagtagtttataatacatggaggtcatatttaatggcgtcaaaatatggaataaatgatatagtagaaatgaaaaaacaacatgcgtgtggaacaaaccgttttaagattattagaatgggtgcagacataagaattaaatgtgaaaattgtcaaagaagtattatgattccacgtcaaacgtttgataaaaaacttaaaaaaatcatcgaatctcatgatgatacacaaagataggagaatgattaatggctttaacagcaggtatcgttggattgccaaacgttggtaaatcaacattatttaatgcaataacaaaagcaggtgctttagcagcgaactatccattcgctacgattgatcctaatgtagggatagtagaagtgccagatgctagattacttaaattagaagaaatggttcaacctaaaaagacattgccgactacatttgaatttacagatatcgctggtattgtgaaaggtgcttcaaagggagaagggttaggtaataaattcttatcacatattagagaagtagatgcgatttgtcaggtcgttcgtgcatttgatgatgataacgtaactcatgttgctggtcgagtagaccctattgatgatattgaagttattaatatggaattagtactagcggacttagaatctgttgagaaacgtttgcctagaattgaaaaattagcacgtcaaaaagataagactgctgaaatggaagtacgtattttaacaactattaaagaagctttagaaaatggtaaacccgctcgtagtattgactttaatgaagaagatcaaaaatgggtgaatcaagcgcaattactgacttctaaaaaaatgctttatatcgctaatgttggtgaagatgaaattggtgatgatgataatgataaagtaaaagcgattcgtgaatatgcagcgcaagaagactctgaagtgattgttattagtgcaaaaattgaagaagaaattgctacattagatgatgaagataaagaaatgttcttagaagatttaggtatcgaagaaccaggattagatcgattaattagaacaacttatgaattattaggattatcaacatattttactgctggtgtgcaagaagtacgtgcttggacatttaaacaaggtatgactgcacctcaatgtgctggtatcattcatactgattttgaacgtggatttatccgtgccgaagtaacaagttatgacgactatgtacaatatggtggcgaaagtggcgctaaagaagcgggcagacaacgattagaaggtaaagaatatattatgcaagatggcgatatcgttcatttcagatttaatgtataaacgatagagtgaagttaattaaatagtatatatgtagaagaggcggaatcaattgttcgcctcttttaattatgcgtataatttattaaaagaatggaataattttactcgcgttaataatatcttgagtgctgaaaaattgtttgccttcgccagtataagcaggctctaaaacaagattagcctttgcacaataaagccattcaggatgaataccactattaagtatctcttggaattcttgaaaatctttagaccaatcaatatttaaattcattccttaccacctcacaactattatagaacatatgttcgcttttgtgaagtgtatttttaaaaatatcatagaaagtttcaaatgaattaatatcaaaaatgatatgaagagtagtttgaattattattgtaaaaagtaatggcgcatgatataattctttattgtgagtaatgaaaattattccttgcttatctgttttaagattgataagccgtatagaccacaaggaggtgcaaatataaaatgagaacatatgaagttatgtacatcgtacgcccaaacattgaggaagatgctaaaaaagcgttagttgaacgtttcaacggtatcttagctactgaaggtgcagaagttttagaagcaaaagactggggtaaacgtcgcctagcttatgaaatcaatgatttcaaagatggcttctacaacatcgtacgtgttaaatctgataacaacaaagctactgacgaattccaacgtctagctaaaatcagtgacgatatcattcgttacatggttattcgtgaagacgaagacaagtaataattagagggggcgtttaaatgctaaatagagttgtattagtaggtcgtttaacgaaagatccggaatacagaaccactccctcaggtgtgagtgtagcgacattcactcttgcagtaaatcgtacgttcacgaatgctcaaggggagcgcgaagcagattttattaactgtgttgtttttagaagacaagcagataatgtaaataactatttatctaaaggtagtttagctggtgtagatggtcgcttacaatcccgtaattatgaaaatcaagaaggtcgtcgtgtgtttgttactgaagttgtgtgtgatagcgttcaattccttgaacctaaaaatgcgcaacaaaatggtggccaacgtcaacaaaatgaattccaagattacggtcaaggattcggtggtcaacaatcaggacaaaacaattcgtacaataattcatcaaacacgaaacaatctgataatccatttgcaaatgcaaacggaccgattgatataagtgatgatgacttaccattctaataaaaattaacgaaattaaagcgaaaaaattatcaaaggaggcacacaatcatggcaggtggaccaagaagaggcggacgtcgtcgtaaaaaagtatgctatttcacagcaaatggtattacacatatcgactacaaagacactgaattattaaaacgttttatctcagaacgcggtaaaattttaccacgtcgtgtaactggtacttcagctaaatatcaacgtatgttgactacagctatcaaacgttctcgtcatatggcattattaccatatgttaaagaagaacaataatatataatttattgtcaaaccccgtaggcataggcttacggggctttttgtgttttggggtatagaaaaagggcaaaaaaggatgatgtgaatgttttgtgttcggaatttgcacaaagatatgtttatattgcaaaaataatatgaatttagatgcataaaaaaagaactacgcattttaaataaaatgcatagctcttctttttcttgcatacgaattaaaataactcgcgagacctataagtctctttcctcactagatagtttatacttttggtctgttgaagtcaataattttatctaaagctataaaaaatcttttgatagctaatgcattattataatagctttcgtttcttttatatcgcttttgaagttggtccaaatcgtgatatcttgcttggataattgcattactacaaacttgattatgtaattctagcgtagcgaaagtatctatgaaattttttattccgaacatgtttctagatatgcctatattattccctttttcaaataaatattgaggtaatctactgtcataatttagatttgctatgatgggttggttatgagctgatttgtttcttatatttttaactaaaggcattaaaatattagcaactctcaattcttcgtcattgtacttcttgtaatagaagttgagaaacgaaacgaattgacctagttgcatgaattcaatgcaaacccatgcgggtggattttgatagtatttattcaacttctcgggtagttgtcctcgtttattcatatgcttgaatatttcgtttttatttttgattttggtttccataacttcttctggtgttcttgaatttgtgtcaaaatttgaattgctatatgatttatcaatacataagaactcatctattattttataaccatcttcttggttattttctgttattagttttaagactagatactttaaactatgttcaatatctaaagttaaatgcaacattgtgtatcttaatttcatatctatagttgctaaatctgataaataagcaaattctatgaaatagccgccattctttttttcgaaattttttcggaaataagctagtttgaagaagtaattattttttctaagaatttcatttgctttttcggtgtcaataatattaaaaaatatattcatctgttttaattttgctatttgctcatcaaaattgagcataggcttaatttctgctagtgtatcatctttttccaattttaactccccaatcgttcaaatttattcatcatatctttcgccatctgattagtaacatgtgtgtatatctctagattttttttataatctgaatgacctacatgctcttgcattgcttttaagttaattcctaattgagcaagtgtagatatatgcgaatgatgtaatgtatgcgtcgttataggtttcttaatagaactaatatcagcgcccccctttaataatgtggctaattttgttcgagtcgatagggctaccagacgtatttgtgaatatgtactctctatcaataaacttatcattccaagcataagtgttcttagtaagtcgatgctttgggtagtgagccctgtggccttatagctattacttctttcagttgtctcctttactccgaatgctcccgtcttttttcagttatccaattaactttaccgtcgatatctagcgttttatcttcatagtttatatttactctctttattgcaagtagctcaccgatacgcatgtcattagcaatttgaaactgtaccatagcttttaccattttataattacgttttgtcgttggatatttttatacttaattacatagtcgaaacaatccagtaactccttaacttcattatcttctaatgtgttattatgtttagctagtaacgcatcactatagggatatctattttatctattacacatataactttgaattgcttgctattttaaattaacaaattttattctcttagattttgtccaattatgtgtagacgatttatagttattaaattcagagtggtagcaaattaaagttaatcaagagttaagatgaatttaattcatgaacacgtctattatttttataattgtagcaaataaagctttacatcaaggaggtaattaaatatgttcaaaaaatatgactcaaaaaattcaatcgtattaaaatctattctatcgctaggtatcatctatgggggaacatttggaatatatccaaaagcagacgcgtcaacacaaaattcctcaagtgtacaagataaacaattacaaaaagttgaagaagtaccaaataattcagaaaaagctttggttaaaaaactttacgatagatacagcaaggatacaataaatggaaaatctaataaatctaggaattgggtttattcagagagacctttaaatgaaaaccaagttcgtatacatttagaaggaacatacacagttgctggcagagtgtatacacctaagaggaatattactcttaataaagaagttgtcactttaaaagaattggatcatatcataagatttgctcatatttcctatggcttgtatatgggagaacatttgcctaaaggtaacatcgtcataaatacaaaagatggtggtaaatatacattagagtcgcataaagagctacaaaaagatagggaaaatgtaaaaattaatacagccgatataaaaaatgtaactttcaaacttgtgaaaagtgttaatgacattgaacaagtttgaaattaagctaaattagtatatatagtgttttatcgctaatactttgaaagttaggtatctaaaggtgcctagctttctttgttatgattagcaccatcatatagaaaattctttaatgacgtttatgccgaaatctacaaaaataatttctcttttatggttaatcaatatgtttttacattcgacaaccttaaaattaacttctttcaatttcataataaagtctctataaaataacttagtttaaaaacgattcgtatctttcagattcaaataccatcattttctcctaatacttacactttaattacaattatgtaagttgttttcagatacatcctattttatattttgtcagaggtgatcttttgaaaacgattttaaaaacaataacatatcttgtacttactatcattggcgcttatgctgctttattcattttaaaaacaatagactcccatggtataacagatcaatttaacccattagtaaagaaggatgattcttatgttaaaacgacagaggtgtctactagaatggatgatcaactccgaagttatagtcaaagtgtttttaataaagaagggaaagagacgcaattaatgtatactgctacatttgatgttaaaccgcatagatacttgaaaattacacataaaggtcatcatgtagaaacttttgaagaagttgaaaaggaagaagtaccaaagaaagcattagacaaactgagtcgataatagcatgcttatattacatggttcatttataaaaggagtacgaacgaaagtaacgcatgacgattaatttaaaaatatttgtaataattatgaataaaattaaaaacaaggggtaatacaatctatatagcatataagcttttgttatgagtttcaaaaataggaagagagagtgatattatgaaattaaaatcattagcagtgttatcaatgtcagcggtggtgcttactgcatgtggcaatgatactccaaaagatgaaacaaaatcaacagagtcaaatactaatcaagacactaatacaacaaaagatgttattgctttaaaagatgttaaaacaagcccagaagatgctgtgaaaaaagctgaagaaacttacaaaggccaaaagttgaaaggaatttcatttgaaaattctaatggtgaatgggcttataaagtgacgcaacaaaaatctggtgaagagtcagaagtacttgttgctgataaaaataaaaaagtgattaacaaaaagactgaaaaagaagatacaatgaatgaaaatgataactttaaatatagcgatgctatagattacaaaaaagccattaaagaaggacaaaaagaatttgatggtgatattaaagaatggtcacttgaaaaagatgatggcaaacttgtttacaatatcgatttgaaaaaaggtaataaaaaacaagaagttactgttgatgctaagaacggtaaagtattaaagagtgagcaagatcactaaaaagattcgttgcattaacgcttgtaaaatgtcttaattcatattaattaataaaataccctcacaacgtaatgtaatatatccagtatagatttgaaaggatatatgccaaacgtgttgtgagggtttatttgcatctatttatccatgcgaatatcgacttcttctaaatgtttctgatattctttaaccttactttctaaaaacatttcatatggtgcatcaaagaagtcagctaaatgcatggcatctttaaatttaggttcatggtgatgattctcccattcccaaatttgatgtgcttcatatttagtaccatatttctcatttaattgctgtgctaattcgtcaatttctaaattatgtttagttcgtaagttatataaaatatgcatattcattgttcattaacctcgcttcttgatttaaaattcaaagatgctctaataatatgtgtatattctagtcctataacataaaataatcaagctatgaattcggcagaaaaaataatgtaaatgtatatgatattatcggtacagagactttaaataacgatagctacattgaataaaattgatattcaattactacttttaaaaatatttggataaaaataatttgaatttgttttagaattgtaaataaggggtactacttagaataacgcaaaataaatagaaaaaggagactgaaaattatgtttggatttattggaatgttaattgtcggtggcttaattggatgggctgctggtgctattatgggtaaagatatcccaggtggtattttaggcaatattatcgcaggtattattggatcatgggtaggtggcaaactattcggacaatggggtcctgaattaggaagtatttacatcttgccagcattaattggttcaattatcttaattgcaatcgtaacgttaattttaagagctatgcgtaaataataaaaaaattcaattggaaattgaaataaagatggcattcagttgtcatcttttttatttgcgtgaaaatggtcaatatgtattataatatttgaaaatgtagataagataggattaaaaagtaataaattaatatgaggaaattttggaaataaaaaagcgagtatttgacaaataaaaaaaggatgacgttgggttgcgccatccaggagtattatgttcatgaatataaaagactgtgtagtcatttaagaactacacccatatagtaacacatcacttgattaaagacaatactatttttagagtcattaatttaaaatatgaattaattctttttttagaatagaatattaagattgatatcgaattagtagtcaaagtgttatggtagatatgaaatacataaggtaaggagtaatattatgacgatttatttagttagacatggcgaatcaaaatcgaattatgataataaacattttcgatcttatttttgtggacaattagatgtgccgttaacggatactggcacaaaaagtgcagacgatttatgtgattattttaaagagaaacagattaaacatgtatatgtttcagacttattaagaacacagcaaacgtttgaacatatttttccatatgacattgcatcaacgactacccctctattaagagaacgttcacttggcgtatttgagggtgaatataaagatgaaatcagtgcgaatccgaaatatgaaaaatatttcaatgatccaaactttaaagactttcgtcatagtttttcacaaaaagcgcctgaaggagaaagttatgaagatgtatatcaacgcgtagaacattttatgaatcatgttgtcaatgaagatacacaaaaagatgatattgtcattgttgcacatcaagttgtcattcgttgtttgatggtttattttaacaaagtttcaagggcagaagctgtggatttaaaggtagaaaattgcaaaccatatatcattgaatagaagtatagaggttctgaaaaactgtgttttatagcggccttcagaacctttttttcatttggaatttaaggggaatcattcttttcaacagacttaccaccaatggctaatgtgataattgtgcttgtgaacaaaataattgaagttataaatgacgctaatgtaaaaggtgtaaattgtgtgagcgataatatcaatgataaaaagaaccaagagatagcccctagaaattgtaaaatagcagaagaaattctaaaactcatataatcatatatagctaaaacaagtgaaggtaatgcgactaataccattataatgatgttgagggtgaataaatatggctgttcaaaagttactgtgtttggtcctgttggatgcattgctgctaagaacaagcaaacaatcgtcgataaaattgctaaaataataaaagtaattcgaactttcatcatgatcatcctttgtttatagagtcaatataagtatggaatatgttaggtatatagtcaaatgcgtcaactaatgggaattttggcatagatagagaatttaaggcaattaaaaaggcatcaaacagtaatatgctgcttgatgcccaaatgatgactttagctaaattgattagtcacttttaaagataaagaattgtcatgaattaaaactcatgtaatgatgtgttacatttcgcaatgatggctttcagttatttatcgataacatcactcttgatacctttagattttaagaaatctttaattttatcttgttgctttttattaacatcaccggcatattttgttggcacgtcgacaacattgattttattttgcggttgatagctaagcttttcaatatcttcatcaacattggcgattgtactatttaaagctttgaagtaattcatcattaattcaacgggtttcttatattctttaggaatattgttttcagtgacaaatttcttgaaatgcaaatcgtttttaacagctaagttagataagtggctaagtgtttctgcttgtttttcagtcacttttgtttgactgtcaatttgtttatctagtttatgttgcataatatatttgttatcaagtatatcgctatttacagacaaatacttttctatagcttgcttcatctctgcatcactaatatcactatttttcttatctgagttaaagatatcttttgtttctaattttttagcgcttttaggtgcatggatgccagtacttgtatgatgatcttcgttatcagattgatcggacgcgcaacctgtaagaattaatgtcgatgctaaaaatgtacttagtagtaatctctttttcataatgtaatataactccttagtttatctttaattgaaaaaatatgtattcatgtttaatagagtaacattgaattagtttggaatgtcacgatgaccttgcaatgaccatagacgtaaatgattacgtgcatgagttgctttttctatcaataatgcatcattttggacgttgttaaggatagctttatctataaataactgcataattggttgtactaatttagacgtaggtatcgtacgtaaaagcataataatttcgttcacatacttttctttctcaatatcatttttcatattgatttgtttgcgagaggtacatactttaagcattatcgcacatctcgttgtatatattaagtttatcataacatgattttatgtcgggataaaaaaataacagcatcttaacaaatgtaagatactgtcagtgaaatgaatgaaactttagtttctgataatatagtcaaaggcatttaatgctgcatttgcaccagcgcccattgaaatgataatttgtttgttcttctgatctgtgacatcgccagcagcaaatattccaggaacattcgtattattgttacgatcaatcacaatttcaccacgttcgtttaattcaacagcatcgtttaaccatgatgtgtttggaagtaaaccaatttgaacaaagataccatctaagttaagtagatgttcttcgccggtgttcatgtcttcgtaacgtatacctgtaacatggtcttctccgacaacttcagtagttttggcatttgttttgatatcaacatttgataaagaacgtaaacgatcttgtaacacgttgtctgcttttaattcgctagcgaattcgaataatgtaacatgattaacgataccagcaaggtcaattgctgcttcaaccccagagttaccgccaccgataactgctacgtctttattttcaaatagaggtccgtcacagtgagggcagaatgcaacacctttattaatcaattgctcttcacctggaatgtttagcttacgccaacctgcaccagtagcaataatgactgttttactttctaagacagcaccgttttctaacgtaactttaattgcttcgtcagtcttttcgatatctgtagcacgtatacctgtcattgcatcaatgtcatattgatcaatgtgcgctgctaagttagaagaaaattcagaaccagttgtttctttaacagtaatgaagttctcaataccagcagtatcattaacttggccaccgatacgatcagcaactataccagtacgtaaacctttacgtgctgtgtaaatcgctgcactaccactagcaggaccaccaccaacgattaagacatcataaggttctttattttcaaactcagatgcatctgccgtactgcctagtttcgaaagaatatcttggattgtcatacgaccattgccaaattcttcgccatttaaaaagacagcagggactgccatgatgttttcagattcttcacggaacactgcaccatcaatcatagaatgcgtgatgttagggttgatcacactcattaagttaagtgcttgaacgacatcaggacatttttgacacgttaaactaatgaatgtttcaaaatggaatgaaccttctaattttttaatttggtcaatgattgactgtttttctttaggtgcacgaccactaacctgtaaaattgctaaaacaagtgagttaaactcgtgacctaatggaatacctgcaaatgttacacctgtttcttcgccaggacgattgactgagaaacttggtgtacgttttaaagatttttcagaaagagatagtctaggtgacatatcagtaatttctgtcaacaaatctttaagttctttggatttatcatctgaaccaaggctggcaacgaattcaacgttgccctccattagttctaatagttgtttaagttgttgttttaaatcagcattaagcatggttgtaatgcctccttagattttacctactaaatctaaaccaggttgcaatgttttagcgccttcttcccatttagctgggcatacttcgccagggtttttacgaacatattgagctgctttgattttgtgagctaatgtactagcgtcacggccaattccgtcagcgttaatttcagatgcttgtacaacaccgtctgggtcgataatgaatgtaccacgttgagctaaaccagtagcttcatctaatacatcaaaattacgagtgattgtttgtgatgggtcaccaatcatagtgtaagtgattttgctaattgcatctgaatggtcatgccatgctttgtgtacgaagtgagtatcagttgatactgagaatacatttacgcctaatttttgtaattcttcatattggttttgtaagtcttctaattcagttggacaaacgaatgagaagtcagcaggatagaagcatactacgctccaagaaccttttaaatcttcttgtgtaacttctttaaattgatctttttttggatcgaaagcttgcgctgtaaatggtaagatttctttgttaattaatgacataaatatcttcctcctaagaatttaagtatgaattagaactatcaattgattgcgcttaattataataattctaatctcttagttagcattattacattttgatccagaatagtcaactggataactttgtaaagtgaatgattacttttaaaataaagaaagataatataaagtgctttgataatggattttgtagttgatgatttaaaaggttgtgtctatatttaatatcttgattttaatgtaaaaaatgtaaaaaaagaagatttgtattctcaactaagtcaaccttattgataatggtatgagaatatttgttcgagatggatgaaggtaatgagtgagaaactggatttttaaagtatgagacaatattttaaaaagttcaattattaacttataagcaaataattgctataaaaaagtttggacgtgtacaattgcaatatgaagattttaaattaattgtaaagtatcgaggagtgggtaacgtgtcagaacatgtatataatcttgtgaaaaagcatcattctgttagaaaatttaagaataaacctttaagtgaagacgttgttaagaaattggtagaagctggacaaagcgcttcgacgtcaagtttcctgcaagcatactcaattattggtatcgacgatgagaagattaaagaaaatttacgagaagtttctggacaaccttatgttgtagaaaatggctatttattcgtctttgttattgattattatcgtcatcatttagttgatcaacatgctgaaactgatatggaaaatgcatatggttcaacggaaggtttgctagtaggtgcaatcgatgcagcattagttgccgaaaatattgcggtaactgctgaagatatggggtatggcattgtctttttaggatcattaagaaatgatgttgaacgcgttcgagaaattttagacttacctgactatgtcttcccggtatttggtatggcagtaggggaacccgcagatgacgaaaatggtgcagccaagccacgcttaccatttgaccatgtcttccatcataataagtatcatgctgataaggaaacacagtatgcacaaatggcagattacgaccagacaatcagcgagtactatgatcaacgtacaaacgggaatcgcaaagaaacatggtcgcagcaaattgagatgttcctaggaaacaaagcaagattagatatgttagaacaattgcaaaaatcaggcttaatacagcgatagcaagataccaaaataacccgcccccctctagcttaaaatgataagtatagctagagggggcgggtatttcttgcaatgaattagtgtgaagttaatgcagcattatcatttgaatcgaaagtatctttatcccaatgtttagttaacttggcggtacctgtaccagctagcattgaatcgttcacgtttaatgctgttctacccatgtcaatcaatggttcaacggagatgagcacgccggctaaagcgactggcaagtttaacgttgacaacaccaatatggatgcaaatgtagccccgccaccgacgccagcaacgccgaatgaactaataatcacgacagcgattaacgttacaataaattgtaaatcaatttctacattagcgacgggtgcgaccataattgcaagcatggcagggtaaatgcctgcacaaccattttgtccaatcgacaatccaaatgtcgcagcgaaattggcaataccttctggcacgcctagacgtcttgtttgtgtttgtacattcaatggtaaggcacccgcgcttgagcgtgatgtgaatgcaaagattaatacttccaaagtctttttaacatagcgaattgggctaatacctaacaggcttaaaataattaagtgaatgatatacatcgtaattaatgcagcgtacgatgcgattaagaattttcctaaagtccaaatggcgccaaagtcacttgtcgataatgtgttggccataattgctaatacaccgtatggcgttaaacgtaagacgaacgtcacaatcgccattactagtgaatagatagcgtcaatcgcacgcttaagcaattcaccatgatcaggttgtttgcgtgctacgcgtaaataagcaaatcctataaacgaagcaaatatcacgacagcaatcgtggaagttgcacgttgtccagtgaaatctaagaatggatttttaggcaataattccaaaatttgttgtggtaacgtatgtgctgttaaatctttcgcttgtttagcaatttcgcttccacgtgcttgttcagcgttaccaaggttaattgttgatgcatctaaaccaaacaccaaggcatacacaacaccaacaatcgcagcaatggtgacagtgccaattaaaaagataaaaatgagactaccaattttagcaaacttttctccgatttgaattttagtgaatgcagctacaatagaaatgaaaattaaaggcataacaatcatttgcaacaatgcaacgtaaccttgtccgacaatgttgaaccagtcacttgttgatgtaataacattcgaatgtgtgccataaataagatgcaataacacaccgaatactataccaatccctaaagctgtaaacacacgtttcgcaaaagatatatgtttgcgagccatcatgtgcaatattacgatgaaaatcaccaatacaataatattaatcagtgtaagaaaagcattcatgaacgtcactccttaaatttttgaatataattccgactagtatgctaagaataatattaattttaaaatatttcaagagggcatttgcaattaaatgtaaacatgatgaaattcgaccgttggcataaggggatttgtaaacaaatcgttttgaattcagtagtgataggtggaaagggtaaatagtgtgatgagctagtcgattaaagttaatatttgaaaatgaagcagggcattaaatgcaataaattaaataagttgtcattaaagcattaataatagaaatgattttaacaggaaaaaagtgatgaatatttggaaaagatatatatcgtgcactgtcatgagagataagatatgagaaaacaaatttatccttgaatcgagatgtggctatggcggtttgataaaaattgctaacctcatatttattgaatgaaaagataataaatgatcaaccttgaaaagacgtttcgaacaaacacgttgtaaaaaattctgtcgaatcaaaattagcatcttttgagtgttcgtgtgtgcaggtggtagttcaaaagctaccgtaaacaaatatttttgtttgagcaaaaaggcgtttgtagtaaatgtgaatatgagtgtgcacttgtgcgattcgtcagttactaacacagccaaacatttaaattgaatggacttattaagatgaatctatttagaagtacacagaagccatcccatttaaaagtaacatactataaaaatttattcaaaattcaatattaatcataatgaataattaaaaaacctgaaacaaattagtttgatatgctctcttcaaagtagatattgaatggagtatatcagcttgtttcaggttttatgaattgagtattaaatttgaaagtaaattacagttctataggtttataaaaatcagtttttaaatcaaagctatatatgaattgagtattaaatttgtgttcaaatcacaagtttacaggttgaataaacgtgcgaagaaaccttttttctcttcttgaggttttggttctgacatttctgactgtgaagctgtgctgtcattttctgctttcgcttccaatgaatcgttcgaagtagcttgtttagaagcttctgcatgggcttctgctacttgttgttcagcatcatgttgcgcttctgcatctactgtagcttctttatttgaagtctcagctgcattgtcatttttagactgctcaacgctggctttttcaattgcttcagttgcagaaatttgatcctctttatctactttagtagcagtgccatcgcctgcattttctgctttagtatccgtcttagcgtctgttgatgtattcactccagcaaccttcgaatctttactgtcagctttatcttcagtaacagcattcttttcaactttatttgttgattcagctaatgcttttgcttgagaggcttgcgcttcttggatagcctcttgtgatgtttggatggcttttaaggattcgctatttgaatcgattttagatgtaagttgattttgaagttcttttaattcttgttgttgctgatgtacttgattcatcatttgaccaagtaggtgacgttcttcgcgcattttctggatttctaggcgtaaatcttctactagttgagcgacattttgattagtaggtaagtttttgtcatcgtttttgacaatgacttgcaggaagtctttttctttttctaattcatcaaacgctagatcataactatttgtttgttttactttgtcggcaatgtctttgaaaagctcgatatcttcttctttgaaatcagttgcttcacgaccacgatattcagtcttgcttagttggtaaccacgttcttctaaatgttgaacaattttacgtacttgcttctcacttagttctacgcgttgtgcaaattctttagttaacatactttaaagtcctttctgcatatactttatgtatactgacgtttgtctacgggcagtgaaacgtcagtcttgcttcatacatagtttaaacgttattgttagtgatttcaagtttgtttaaaatggtttacgtaaatccatttcttctaataaagcataaataatttcacgtgcgataccattggcaaatacatacttcaaaatataatttgatttaacacttgtaccgtagatatcctttgtcagtttaatatttttctttaaaaataagtccacttttttagtgtgaccatcattagttggatgaatgtaatcaatttcagtttgtctttcaaattgatgttcgtataaaaactgtctacggtgttcaataatgaggccgttatcttgtgttaaatctgcaggttctttagggacttccatcattaaaaagttaatacttctagaatgaacaaggtttgataataagtttagttcatgttcaatttgatgtaatgtttgcgtcattaactcatcatggttgggtaggtcttttgcgaataaataaattaaaaatgctgaattggttgtggcttcataatgtgcagttgctagactgacaacaacatcgttttctaagcctacgataaagacataatcgttttcggttttgttgttttctaatgagcgtttgatgatacgtttatcttcagttaaagataaatttaacttagtatcgtaaagtttaagtgcttcgttgtaatgtggatctttgacagattgaatggttttaaattccataagaacacctccccaatttaaataatattatagcataatcgcctgctgtaaaagactgttcataaacttttaaatggtataaaaaactgtactatcttaaattagacagtacagtaatctcattttgaattcagtgtgataactaagctttgggacctttagatgcttcagcaaaatgtgtaatatcaatctcttcataagctgaattattttcatgcacttcttgatgtgatgatttgtcacgaaccgctacaactaacattttatcgtctaaaataagttgtttatatttttctaattcatcaggcgctaagttgtagcgtgataaaactgcatgttcaccatcttctcctgttaacagtttagtcattctatcactaaatgttccacttgttgagataagggagatttcagagtcgtgtaagtcatttaggtgtaatttacttttactaataattgttagctctgattctaaataaccttcagatttcttttgattgattacgttgtataattcgccagtgtcatttactacagtaatatctgccatagttgtcgcccctttaaaaatttgtttatttaatcttttacccttcttattataaagtaaaacccttacattattaagttataagtcttcattcgcattaaacgtctctgtacatttataaaactattaaaagattacctaagcagttattgaaaaaatgccgaaaatttgctattatcgttaaataatttacataaactcatataatctaaagaatatggctttagaagtttctaccatgttgccttgaacgacatgactatgagtaacaacacaatactaggagtagcttcagccattaaattgtaaccatggtgggtgatttatatcattttatatgatggtcacagtttatttgatgaaacttcttttacattgattgcatgacaaattcgttatgcatgttcgttcactcataaaccctgaaactattatttagtttggggatttttttgtatctagcaccaatttaagagcaaaatgtttcacacaaatctgaggaggttttaagagtggagttactaggacaaaaagtaaaggaagacggcgttgtcattgatgagaagattttaaaagtcgatggatttttaaatcatcaaattgatgcaaagttaatgaatgaagttggtcgcactttttacgagcaatttaaagataaagggattactaaaatcttaaccattgaagcttccggtatcgcacctgcaatcatggctgcactgcattttgatgtgccatgtttatttgcgaaaaaagcaaaacctagcactttgacggatggttattatgaaacatctattcattcatttactaaaaataaaacaagtacggtcattgtttcaaaagagtttttatcagaagaagatactgtacttatcatcgatgactttttagcaaatggtgatgcttcattaggattatacgatatcgcacagcaagcgaatgctaagacagctggtattggtattgttgttgaaaagagtttccaaaatgggcatcaacgtttagaagaagcaggtttaacagtttcttctctctgcaaggttgcttcactagaaggaaacaaagtgacattggtgggagaagaataatgaaaaatttaatcctaagtgttcaacatcttttagctatgtacgcaggtgctatcttagttccaatcattgttggtacaagtttgaagtttacacctgaacaaatcgcttacttagttacagtagatatatttatgtgtggggttgccacatttttacaagccaataaagtaacaggaacaggattaccaatcgttcttggatgtacattcacggctgttgcgcccatgattttaattggtcaaacgaaaggaatagatgtactttatggttcgctatttttatcagggatattagttattatcatcgcgcctttcttttcacatcttgtaaaattcttcccaccagtagtaacgggtagtgttgttactatcattggtatcaatttaatgccagtagcaatgaattacttagctggaggtcaaggtgcaaaggactatggagatgttaagaacattttgttaggtttaatgacattaatcattattcttcttttacaaagattcacaactggatttattaagagtattgccatattaattggactcgttttaggaacgataggtgctggcttacttgggatggtcgatattaatcaagtcaatcatgccggttggttaggcatcccagtgccgtttagattctctggatttagctttgatgtgacatcgacgttagtgttctttattgtagctatcgttagtttaattgagtcgacaggtgtctatcatgcgttaagtgaaattaccggtaagaagttagaaagaaaagattttcgtaaaggttatactgcggaaggtctagcgatagtgttaggttctatattcaattcatttccgtatacagcctattcgcaaaatgtaggacttgtttctttatccggcgctaagaaaaacaatgttatatacggcatggtcgtgttattacttatatgtggttgtatacctaagcttggcgcattagcaaatatcataccgctacctgtgttaggcggtgcgatgatagctatgtttggcatggtaatggcatatggtgttagtatattaggacatatcgattttaaaaatcaaaacaatttattaattatcgctgtatcagtaggattaggtactggtataagcgctgtaccacaagcatttaaaggtttaggtgaacaatttgcatggttgactcaaaacggaattgttttaggcgcaatctctgcaattattcttaatttcttttttaatggaataaagtataaacaaacggaagaaaatgtgaaataatataactaattaatttgaaaaatggaggctgtttttaatgtgggaaagtaaatttgcaaaagaatcattaacgtttgatgatgtgttattaattccagcacaatctgatattttaccgaaagacgttgatttaagcgtacaattatcagacaaagttaaattaaatattccagttatttctgctggtatggatactgtaactgaatctaaaatggcgattgctatggctcgtcaaggtggtttaggtgttattcataaaaatatgggcgttgaagaacaagcggacgaagttcaaaaagtaaaacgctcagaaaatggtgtcatttcaaacccatttttcttaacgccagaagaaagcgtttatgaagcagaagcattaatgggtaaataccgtatttcaggtgtaccaattgttgataataaagaagatcgcaacttagtaggtattttaacaaaccgtgacttacgttttattgaagacttctcgattaaaattgtagatgtaatgacgcaagaaaatttaattacagctccagtgaatacaacacttgaagaagcagaaaaaattctccaaaaacataagattgaaaagttaccattagttaaagacggacgtctagaaggtcttattactattaaagatattgaaaaagttatcgaattccctaatgcagcaaaagatgaacatggtcgtctacttgtagccgcagcaattggtatttcaaaagatactgatattcgtgctcaaaaattagtcgaagcaggtgtggatgtcttagttatcgatacagcacatggtcactctaaaggtgttatcgatcaagtgaaacatattaagaagacttacccagaaatcacattagtagcaggtaacgtagcaactgcagaagcaacaaaagatttatttgaagcgggtgcagatattgttaaagttggtattggcccaggttcaatttgtacgacgcgtgttgtagcaggtgttggtgtaccacaaattacagcaatttatgattgtgcaactgaagcacgcaaacatggtaaagctatcattgctgatggtggtattaaattctcaggagatatcattaaagcattagctgctggtggacatgcggttatgttaggtagcttattagcaggtactgaagaaagcccaggcgcaacagaaattttccaaggtagacaatataaagtataccgtggtatgggctctttaggtgcgatggaaaaaggttcaaacgaccgttacttccaagaggacaaagcgcctaagaaatttgttcctgaaggtatcgaaggacgtacggcttataaaggtgcgttacaagatacaatttaccaattaatgggcggtgtgcgtgctggtatgggttatactggttcacacgatttaagagaattacgcgaagaagcacaatttacacgtatgggtcctgctggtttagcagaaagccatccacataatattcaaattacgaaagaatcaccgaactactcattctaattaagataaaggagaacgacaaatatggaaatggcaaaagaacaagagttaatccttgtcttagactttggtagccaatacaaccaattaattacacgccgaattcgtgaaatgggcgtttatagtgaattacacgatcatgaaatttcaattgaagaaattaagaaaatgaatccaaaaggtattatcttatcaggtggtccaaattcagtttatgaagaaggttcatttacaattgatccggaaatatataatttaggaattccagtacttggtatttgttacggcatgcaattaactactaaattattaggtggtaaagttgaacgtgccaatgaacgtgaatacggtaaagcaatcattaatgcgaagtcagatgagttattcgctggcttaccagcagaacaaactgtttggatgagtcattctgataaagttattgaaattccagaaggctttgaagttatcgctgatagcccaagcacagactatgcagcaatcgaagataagaaacgtcgcatttatggtgttcaattccatccagaagtacgtcatacagaatatggtaatgatttattaaataattttgtccgtcgtgtttgtgattgtagaggtcaatggacaatggaaaactttatcgaaatcgaaattgaaaagattcgtcaacgcgtaggagaccgtcgtgtattatgtgcgatgagtggcggcgtagattcatctgttgtagctgtactattgcataaagcaataggtgatcaactaacatgtatctttgtagaccatggcttacttcgtaaaggtgaaggcgacatggttatggagcaattcggtgaaggtttcaacatgaatattattcgtgttaatgcgaaagatcgctttatgaataaattaaaaggtgtttcagatcctgaacaaaaacgtaaaatcattggtaatgaatttgtatacgtatttgatgatgaagcatcaaaactgaaaggtgtagacttccttgcgcaaggaacactatatacagacgtcatcgaatcaggtactaaaacagcacaaacaatcaaatcacaccacaatgttggtggattaccagaagacatggaattcgaattaatcgaaccaatcaatacattgtttaaagatgaagtacgtaaattaggtattgagttaggtattccagaacatttagtatggagacaaccattcccaggacctggtcttggtattcgtgtacttggagaaattactgaagataaactagaaatcgttagagaatcagacgcgattttacgccaagtgattagagaagaaggtcttgaaagagaaatttggcaatacttcacagtgttaccaaacattcaatcagtaggtgttatgggagactaccgtacgtatgatcacacagtaggtattcgtgcagtaacatctatcgacggtatgacaagtgacttcgcacgcatcgattgggaagtcttacaaaagatttctagtcgtatcgtaaacgaagtagatcacgtcaaccgcgtagtctatgacattacatcaaaaccaccaagcacaattgagtgggaataattatatataataaaaccacctgtttgcacgggtggtttttaatttgagtagttggaaaattacaataaggacggaaaaggggtaaggtgttctaagtttgcgttttaattcatcaataaggcaattttccgtgtttatttttatataaaatttcatattgtttaggatcttcttgttttaaatcataaattatagtttcgtctactattttttctaattcaagtgtattaaagctccagtcatttgttgttattataaatattttttggactgggttgttatttatatgattaattagcctaggagtatctgtttctattattagagcagattctacaggatagtaaatagcaaagtctccgtgataaattgtgtttctttcatagaggttaacctctaaggttaaattactcaatttgaagattgtgttttgagttatatttttaggaataattcgattatctactatttgttttaggttgcctattgaacgagtgtgtatcgtcccttttgtgtaatcggaattatttaaagctcttaaaacagttgttaatttatactcgttaacataaccctttactaaagccatccgtttatcgctacctataaaatctttcagttttttgttgaattcattattgttgtgcataatattttatcctttccattagttgattgttttcatttgttcaaatctctatccatttactcggttacagggctgtgtatttgcagagtaatattatgattgaaataaccaacgcgttccgtattcgttttgagtgacgcagctagctgcgataatagtgacatgtggcttataacacattgtgtaatttattgtgtgttttgtgatgtctaatattgattgcagattgttgtatatttcacttaaagggcatttatataaaaaaagaggccagatgacgtatcatctgaccttcagctaaaacgctgagaatatgtcattcttcaagagaatgaagccggaatggttaccgggaatttgtaaatcaattatatcagatgtaatattacaattcaattagaaaagaactttatctttaattgcttttcgatttcattcatgtcatcttctgaaattattatcgttccagtaggatcagaatcatttattttgcttatacgtcttttgcttattgttgtaattgctgatatattaacgtatgtatctttccctttgtgcttggaataaacacctatcactctatacagttcattagctttttgatttaagttagacaaaagctttttatcttctgtgctaagtttaatgtcaatttctctatatttttgggctaatgcttgtactttactactgatatcgataatctgtttttttaaatctgttgctgttagatttagcaccgattcgtttaacttcaaataatttttattacctttggaagaaagtggaactattgtaactgtttcttttcctttattgtctttgttatctaatattacacaaaaatgattaccagaaaactcacttccaatattactccctagttttacatataccactgttcctctactatatgatttataatatctttttttattgcttgtaacatcgctatgtatagcaattgaataaaactctagccaatgaggcatgtatataactttcatgtttttactgtcggattttgaataagcttgttttagttttttgtttgacgtatttaatttactatttgcttgattgatatttttagacattaaatagtgttctcctaatcaatttattcttctttatatcagcattattagcactgaaattaacatgaatggtacgaaaatagatgttactataaaaccaacaatttttattaggtggaactcatcaattttgtatttagcaaatttcgcaatgacctgctatttattcgctttttatagttcatgtatgtgtaaaaaagtctatattgaacatctaattataagcgaattcctaatgctaaaagcaatctaacttacttaaatattattatgagtttttattgaaattaaataaatttaaactatttcttagtctctccatatcgttggaagttggttctttatataatcagataaattagaatcttcaagtaatgtatctttaaaaagttcagtttctaaatcaactttaaaatttgctttaaaacatcatgttccatttttaaatgttgaacttctttgcgtaattttattaactctttttcatcactttttaaattatcttgatgattgaagggtccagtattttggtgttgttttatcgaatttgagataattgagggttttaaatcatactttcgtataatttcattcttaagcttaccatttttatataatctaaccatttgtaacttaaactctgaactaaatgttcttctttcttttgtcataataaaattgactactttcttaatttaacaatatctattctcatagaatttgttcaattaagtgtagacgattcactgacacatcataagtacgtaaggaattttgatcgttcattgttattgctttatgttttagggaatgtgctattgaagggtttaaagatgtttgaaatgtcttggtttcttgacttatatagttatgaaagagggcgttgtcctttatagcatttctgagattagaaatgctataaataaagtgattaagattttttgttttcatgtaatttaagaaatggatttgttttttgtgggttatttttaattctgttcttaaatggtttgaattttgcgattgcaaatatgatagctgcttcttttgacaaagtaatagaacctttttcttctggtaccatgataatcactccttgtgcaattggatttaaatattataaaataattttactatacaaaatatattgtgtaaatagtttcttattgttaccaaataatatgtttggaagcgttatgtaatgccaatcaacaccgaagttctcatgtcctctttccttttacgactacatatattgttaataatattgaaataataaactgatagtgataatatttatttaactgatccatgagagtaggaaccccatcatacgggaatttcgaaatcatgggttttttgttttaaaggattgatgcaatagataaagtagccattctaatatatggagtatttatcagctgaaaattaaatcagatatgggttttcttcattaaataatttttttataaggaaacagaggcaacgctactgtcacctctgcttgaaataattaggatgaaatactctgagtctaaagtccacacacaattcgctcaaatcctccaaacctccgactacatctccaccccccaaacaccaatacttaccaaagcattgatatgagtgccaatactggcaatgtgccttgtttgaaaaagatactaatattgcttgaaaggccaccataaatagcaacgccaatgatatacactaaaatagctgcgcatatttcttttggattactgctgataaacaaaccgtatattagcaaaactccgattaaaccgttatatacgccttggttcttcaaaagtaggttaatatttttgtctttcaatttatcgacgcttatattaaatgtctcgctagtctttttggaagttgtagcaatcgtttcaaggtacataatatagaaaaactctaatgccacaaatatgattaaaattgttgagatgatattcactataacgctcctttattattaaatattttcttgtaaaaatgattgcagtgtctgtggttgatcattgactaattgttggaaatcattggattcttggtctaatagtcctcttgctcctgcgtcgtacattgatgccaataatgcaccaaagcctttaggttcatcatacatttctgcaaatgtctctaatgaaacgggctcatatttaatttctgtgcctgatgcctcagataaaattgcagcaagttctttcatatcataactgtagcctgataataagtagcgtttgccccaagtatctggatttttaataatagcaatgacacctctagcaatatcatttctagtaatataattaatacgaccatcgccagctggataaatcagtttatgcatattcatcaattctggtaaatatggtttaagtggatccatgtacattgccattcttacatacgtatagtcaatgccacttgttgccaatagacgtgctgcataaccaaaataaggactcatatggaatggattattatgctgatctgcgtaataacctatgaaaatgatatgagcaacgccgctctgctttgccgcatatactaaattttccacttcaggaatacgtttgaatgatggatggataatacttggaataaacacaacggtatccattcctttaaatgcttctaccatgctttcttgattaaaataatctaattgtcgaacaggaacttttccgcgccaatcttctggaactttctcaacatttctaacaccaatgtgaaaatgatctatgtgatttgcaatggcttgatttgtaatatgtgtgcctaaatgacctgtagcacctgttaacataatattcattcacttcatctcctaatctttatatacataacataatacttatttgatggttttcaaaacatttgattttataaaaaattctaatctgtatttattgtcgacgtgtatagtaaatacgtaaatattattaatgttgaaaatgccgtaatgacgcgttttagttgatgtgtatcactaatatcattgaaaattttaatcaggtactacgacaatatgatgtctgttttgtgtctgaaagttttacagtttttaaaataaaaatggtataaagtgtgatttgtataaaaaagagtctcgacggataagaattgattaataacagttagcattttattaattaccttaacaatgattcaagtttagttaaatgaggtttaatttgaaaggggatagcgcctcaatataatgtaggtagattgttcatattacgtaattgaaaaatcaaatttaaatagattggggctaaaaattatgaaatttaaagcgatagcaaaagcaagtttagcattgggaatgttagcaacaggtgtaattacatcgaatgtacaatcagtacaagcgaaagcagaagttaaacaacaaagtgaatcagagttaaaacactattataataaaccaattttagagcgtaaaaatgtgactggatttaaatatactgatgagggtaaacactatttagaagtcacagtagggcaacagcattctcgaatcactttacttggatctgataaagataaatttaaagacggagaaaactcaaatatagatgtgtttatccttagagaaggtgacagtagacaagcaacaaattactcaattggtggcgttacaaaatcaaatagtgtgcagtatattgattatatcaatacgtcaattttagaaatcaagaaagataatgaagatgtacttaaagatttttactacatttcaaaagaagacatctcattaaaagaacttgattatagattaagagaacgtgcgattaaacaacacggcttgtattcaaatggtcttaaacaaggtcaaattacaattacaatgaatgatggcacaacacatacaatcgatttaagtcaaaaacttgaaaaagaacgtatgggtgagtcaatcgacggcactaagattaataaaattctagtagaaatgaaataatactttctaacaacaaagcgctatgttgaatagtgcttgttatggaaatatatggaagttaagcgacgtactgttgcttagcttctttttttgaggggaaaagttacaaaactcacacaaacagtcgcaccacgcattatcttttgcttaaatagcttaatcatattttatgaatagttaaaaacaggttaatgtgaatatccgaatacagctcctataatatgggtgtatgattcaaattacgtaataaaacaatctaattataatagattggagcatacaactatgaaaatgaaaaatattgcaaaaataagtttgttattaggaatattagcaacaggtgtaaacactacaacggaaaaaccagttcatgccgaaaagaaacctattgtaataagtgaaaatagcaaaaaattaaaagcttattataatcaacctagtattgaatataaaaatgtgacaggttatatcagtttcattcaaccaagtattaaatttatgaatatcatagatggtaattctgttaataatattgctttaattggcaaagataagcaacattatcatacgggtgtacatcgtaatcttaatatattttacgttaatgaggataagagatttgaaggtgcaaagtactctattgggggtatcacgagtgcaaacgataaagctgtcgacctaatagcagaagcaagagttattaaagaagatcatactggtgaatatgattatgactttttcccatttaaaatagataaagaagcgatgtcattgaaagagattgattttaaattaagaaaataccttattgataattatggtctttacggtgaaatgagtacaggaaaaattacagtcaaaaagaaatactatggaaagtatacatttgaattggataaaaagttacaagaagaccgtatgtccgatgttatcaatgtcacagatattgatagaattgaaatcaaagttataaaagcataacacatatacttgatgacgaaataagttgaaattgaaatagagaggttaagtgacgatcaaacgttgcttaacttctttttaatgcttaaaaattatttcaaaggcacatagaaacgctatattaatctcatactcactcattattttttgcttaaattacttaataatacttcaataattgttaaaaggggtttaatgtgattatcttagaacgccatctataatgatgttgtatgattcaaattacgtaaaaagacaatcgaatataatatagattggagcatacaattatgaaaatgagaacaattgctaaaaccagtttagcactagggcttttaacaacaggcgcaattacagtaacgacgcaatcggtcaaagcagaaaaaatacaatcaactaaagttgacaaagtaccaacgcttaaagcagagcgattagcaatgataaacataacagcaggtgcaaattcagcgacaacacaagcagctaacacaagacaagaacgcacgcctaaactcgaaaaggcaccaaatactaatgaggaaaaaacctcagcttccaaaatagaaaaaatatcacaacctaaacaagaagagcagaaaacgcttaatatatcagcaacgccagcgcctaaacaagaacaatcacaaacgacaaccgaatccacaacgccgaaaactaaagtgacaacacctccatcaacaaacacgccacaaccaatgcaatctactaaatcagacacaccacaatctccaaccataaaacaagcacaaacagatatgactcctaaatatgaagatttaagagcgtattatacaaaaccgagttttgaatttgaaaagcagtttggatttatgctcaaaccatggacgacggttaggtttatgaatgttattccaaataggttcatctataaaatagctttagttggaaaagatgagaaaaaatataaagatggaccttacgataatatcgatgtatttatcgttttagaagacaataaatatcaattgaaaaaatattctgtcggtggcatcacgaagactaatagtaaaaaagttaatcacaaagtagaattaagcattactaaaaaagataatcaaggtatgatttcacgcgatgtttcagaatacatgattactaaggaagagatttccttgaaagagcttgattttaaattgagaaaacaacttattgaaaaacataatctttacggtaacatgggttcaggaacaatcgttattaaaatgaaaaacggtgggaaatatacgtttgaattacacaaaaaactgcaagagcatcgtatggcagacgtcatagatggcactaatattgataacattgaagtgaatataaaataatcatgacattctctaaatagaagctgtcatcggaaaaacaagaagttaagtgacaacggtttacatgttgcttagcttcttttattatgcgtaatgatgtaaaaagacgaatattcatttgtttgtaaaagtggcatttctatgtcttaaaagtgacgaaacttcaaatgtgccaagtgttgaatcacatcaaaatcatttttatttaacgaacattatggatttcttaatttacttaacgatgattcaaatatagttaaacaaggtttaatgtgaatggagcaatacgccatctataataaagctgtatgattcaatgaatgtaatcgaacaaatctaataattacgaatggagcatacaactatgaaaataacaacgattgctaaaacaagtttagcactaggccttttaacaacaggtgtaatcacaacgacaacgcaagcagcaaacgcgacaacactatcttccactaaagtggaagcaccacaatcaacaccgccctcaactaaaatagaagcaccgcaatcaaaaccaaacgcgacaacaccgccctcaactaaagtagaagcaccgcaacaaacagcaaatgcgacaacaccgccttcaactaaagtgacaacacctccatcaacaaacacgccacaaccaatgcaatctactaaatcagacacaccacaatcgccaaccacaaaacaagtaccaacagaaataaatcctaaatttaaagatttaagagcgtattatacgaaaccaagtttagaatttaaaaatgagattggtattattttaaaaaaatggacgacaataagatttatgaatgttgtcccagattatttcatatataaaattgctttagttggtaaagatgataaaaaatatggtgaaggagtacataggaatgtcgatgtatttgtcgttttagaagaaaataattacaatctggaaaaatattctgtcggtggtatcacaaagagtaatagtaaaaaagttgatcacaaagcaggagtaagaattactaaggaagataataaaggtacaatctctcatgatgtttcagaattcaagattactaaagaacagatttccttgaaagaacttgattttaaattgagaaaacaacttattgaaaaaaataatctgtacggtaacgttggttcaggtaaaattgttattaaaatgaaaaacggtggaaagtacacgtttgaattgcacaaaaaattacaagaaaatcgcatggcagatgtcatagatggcactaatattgataacattgaagtgaatataaaataatcatgacattctctaaatagaagctgtcatcggaaaaacaagaagttaagtgacaacggcctacatgttgcttagcttcttttgttatgttcgatgatttgagaacccaaattttcgatgggtccaaatatgacgtggaagagacctgaatttatctgtaaatccctatctatcgggtgtgaagcacaacgggatcagttttatttaacgaacattatagattccttaatttacttaataatgattcaatgattattaaacatggtttaatgtgaaaggtcaaatacgctaactataataaagctgtatgattcaatagacgtaagcgaacaaatctaataattacgaatggagcatacaactatgaaaatgacagcaattgcgaaagcaagtttagcattaggtattttagcaacaggaacaataacgtcattgcatcaaactgtaaatgcgagtgaacataaagcaaaatatgaaaatgtgacaaaagatatctttgacttaagagattactatagtggcgcaagtaaggaacttaaaaatgttactggttatcgttatagcaaaggtggcaagcattaccttatctttgataaaaatagaaaattcacaagagtacagatatttggtaaagatattgaaagatttaaagcacgtaaaaatccgggattagacatatttgttgttaaagaagcggaaaaccgtaatggcacagtgttttcatatggtggtgtcactaagaaaaatcaagacgcttattatgattatataaacgcaccaagatttcaaatcaagagagatgaaggtgacggtattgctacgtacggtagagtacactacatttataaagaagagatttcacttaaagaactcgactttaaattgagacagtatttaattcaaaattttgatctgtataaaaagtttcctaaagatagtaagataaaagtgataatgaaagatggcggctattatacgtttgaacttaataaaaaattacaaacaaatcgcatgagtgacgtcattgacggtagaaatattgaaaaaatagaagccaacattagataattcaatgaaatatggataatagtaaaatatggatagtatagaggagttaggcaacataagttgcttagcttcttttttgtgttggagagatgaaaatgaagcgtatcgatgaataataaaaacaccaataaaacttgtggaaatagttgatacttatagtcgcgcgttgtccttttcgtgacatgaaacaatgtggaaaacatagttaaattgagggaaagtgtgaatagttaaaaaagctgcgttaagtttaaaaaatagattaacgctgttaggattccattaattagcttaacattggttcaaaaatagttaaaaagaggttaattcatagcttagtattacgcttatataatgatagtagattgttcgtattacgtaattgaaataatcatataaaaatatattaagacaaaatttataaatagattgggagaatagtactatgaaattaaaaacgttagctaaagcaacattagtattgggattgttagctactggtgtaataacaacagaaagtcaaacagtaaaagcggcagaatcaactcaaggtcaacacaattataaatcgttaaaatactactatagcaagccaagtatagagttaaaaaatcttgatggtttgtatagacagaaagtgacagataaaggagtatatgtttggaaggatcgaaaagattattttgttggcttgcttggtaaagatattgaaaaataccctcaaggtgagcatgataagcaagatgcatttttagtcatcgaggaggaaactgttaatggaagacaatattcaattggtggtttaagtaagacaaatagtaaagaatttagtaaagaagtcgatgttaaagtaacaagaaaaattgatgaatcatcggaaaagtctaaagatagtaaatttaaaattactaaagaagaaatctcgttaaaagagttggactttaaattaagaaaaaaattgatggaagaagaaaaattatatggtgctgttaataatagaaaaggtaaaattgtagttaaaatggaagatgataagttttatactttcgaacttacaaaaaaactacaaccgcatcgcatgggtgacacgatagatggtaccaaaatcaaagaaattaatgttgagctagaatataaataatctttggacaagcagactagtaattgtagggaagttaagcgataacatattgcttagcttcttttttattttgttatgatgaaaaaaggagcgggtttatgatcaagtttttggaaaaacggttgatacttatagtcgcgcgttgtccttttcgtgacatgaaacaatgtggaaaacataattaaattgagggaaagtgtgaatagttaaaaaattagtattgtgttataaaaaataattaatactgttaggatttcattaactaacttaacgttggttcaaaaatagttaaaaagaggttaattcatagcgcagtatctcacttatataatgatagtagattgttcgtattacgtaattgaattaatcatataaaaatatattaagacaaatttataaatagattgggagaatagtactgtgaaattaaaaacgttagctaaagcaacattggcattaggcttattaactactggtgtgattacatcagaaggccaagcagttcaagcaaaagaaaagcaagagagagtacaacatttatatgatattaaagacttacatcgatactactcatcagaaagttttgaattcagtaatattagtggtaaggttgaaaattataacggttctaacgttgtacgctttaaccaagaaaatcaaaatcaccaattattcttattaggtaaagataaagagaaatataaagaaggcattgaaggcaaagatgtctttgtggtaaaagaattaattgatccaaacggtagattatctactgttggtggtgtgactaagaaaaataacaaatcttctgaaactaatacacatttatttgttaataaagtgtatggcggaaatttagatgcatcaattgactcattttcaattaataaagaagaagtttcactgaaagaacttgatttcaaaattagacaacatttagttaaaaattatggtttatataaaggtacgactaaatacggtaagatcactatcaatttgaaagatggagaaaagcaagaaattgatttaggtgataaattgcaattcgagcgcatgggtgatgtgttgaatagtaaggatattaataagattgaagtgactttgaaacaaatttaaagtaagtaatcaatgactctaaagtaataaatttgaagcagcttaacgatgaaatgttgaatagatacgtacaccttacattaaggagcgtatttaaaacaaccttgtcgttaggcttttttttacgttttataacgcaggttatgagtgagcatactaaaaatttacattgctcttgaaagtgatgcccattgaatattaattagctcttcattaacaatgatttaagtttaattaaacgagtgttaatgtcagtctgtctcaatgccctttataataaaggtgtattattcaaattacgtaataaaagcaatccaatatattaagattggagcacatgaatatgaaatttacagtgatagctaaagcgatatttatattaggaatattaacaacaagtgtaatgataacagaaaatcaatcggttaatgcaaaaggaaagtatgaaaaaatgaaccgtttatatgatacaaacaagttacatcaatactattcaggacctagttatgagttaacaaatgttagtggccaaagtcaaggttattatgactctaacgttttgctttttaaccaacaaaatcaaaagttccaagtgtttttattgggaaaagatgaaaataaatacaaagaaaaaacacatggtttagatgtctttgcggtaccagaattagtagatttagatggaagaatatttagtgttagtggtgtaacaaagaaaaacgtaaaatcaatatttgagtctctaagaacgccgaacttactagttaaaaaaatagacgataaagacggtttttctattgatgaatttttctttattcaaaaggaagaagtgtcattgaaggaacttgattttaaaataagaaaactgttgattaaaaaatacaaactgtatgaagggtcagctgataaaggtagaattgttattaatatgaaagatgaaaataagtatgaaattgatttaagtgataaattagatttcgagcgtatggcagatgtcattaatagtgaacaaattaaaaacatcgaagtgaatttgaaataatcaatgatatatatagaatgaaagcttaagaagcggtttaataatcccatgtttaatgattttgatacgtgtttttataataaaaacatatcgaacattgactacgttattaagctgcttttttgtacactttataaccaatagcttaagatttaaaactaatcggaaagaacaatgattcaccaaaaaaatatttatgttgctattaaaaatcagttaatacgaatgttaaaatacgtttgattttcattaataatgattcaagtttatttaaatgagcgttaatgtcagtctgttttgatgcaccttataataaagacagatagttcaaattacgtaataataacaatccaatacattaagattggagcaaaaaaatatgaaattaacaacgatagctaaagcaacattagcattaggaatattaactacaggtgtgtttacagcagaaagtcaaactggtcacgcgaaagtagaacttgatgagacacaacgcaaatattatatcaatatgctacatcaatactattctgaagaaagttttgaaccaacaaacattagtgttaaaagtgaagattactatggctctaacgttttaaactttaaacaacgaaataaagcttttaaagtatttttacttggtgacgataaaaataaatataaagaaaaaacacatggccttgatgtctttgcagtacctgaattaatagatataaaaggtggcatatatagcgttggcggtataacaaagaaaaatgtgagatcagtgtttggatttgtaagtaatccaagtctacaagttaaaaaagttgatgctaaaaatggcttttcgataaacgagttgttttttattcaaaaggaagaagtatcattgaaggaactggactttaaaataagaaaactcttaatcgaaaaatatagattgtataaaggaacgtctgataaaggtagaattgttatcaatatgaaagacgaaaagaagcatgaaattgatttaagtgaaaaattaagttttgaacgtatgtttgatgtaatggatagtaagcaaattaaaaatattgaagtgaatttgaattagttcgagttaatagcataatagcttaagaagcggcttaacgacaaaatgtgaattggcatttgtgtccttatataaggaactgtgttaaatacattactgttgttaagttgtttttgtaattcaaagagcagaacagagtaacatcatcagttgtagtaaacgataatccggtaaaacaactaaatgaaataatgaaagtcatttaacctgaacattaaaatatatttgtttttcattaagaataattcaagtatatttaaatcgaggttaattatcgtatgaaacgatgcacgttataataaaaatgtatgattcaaattacgtaatgaaaacaatccaatatattaagattggagcaaataaatatgaaatttacagcattagcaaaagcgacattagctttaggaattttaacaacaggaactttaacaacagaagttcattcaggtcatgcaaaacaaaatcaaaagtcagtaaataaacatgacaaggaagcattataccgatactacactggaaagactatggaaatgaaaaatattagtgctttgaaacatggtaaaaacaacttacgttttaagtttagaggtattaagattcaagttttactgcctggaaatgataaaagtaaatttcaacagcgtagttatgaggggttagatgttttctttgttcaagaaaaaagagataagcacgatatattttatactgttggtggtgtaatacagaataataaaacatctggagttgtcagtgcaccaatattaaatatttcaaaagaaaagggtgaagatgcttttgtgaaaggttacccttattacattaaaaaagaaaaaataacactaaaagaactggattataagttgagaaagcatctaattgaaaaatacggactttataaaacaatctcaaaagatggtagggtcaaaattagcttgaaagatggcagtttttataaccttgatttaagatctaaattaaaatttaaatatatgggggaagtcatagaaagcaaacaaattaaagatattgaagttaacttaaagtaaatcattacgaataattaaaagtaattgaagcggcttaacggtgaaatgtaaattggtgcgcatagcttatacaaaaaggatgcatcaatcgatatcgtcgttaagccgttttggtttgtgtgtcatgaatcctatcccaatctccataaaggtaaaatttccaccaccaacatcaaaattctccacatcgcaacataaccaaatgttataataaatctattacacaaagagataaattacttattcaaaggcggaggaatcacatgtctattactgaaaaacaacgtcagcaacaagctgaattacataaaaaattatggtcgattgcgaatgatttaagagggaatatggatgcgagtgaattccgtaattacattttaggcttgattttctatcgcttcttatctgaaaaagcggaacaagaatatgcagatgccttgtcaggtgaagacatcacgtatcaagaagcatgggcagacgaagaataccgtgaagacttaaaagcagaattaattgaccaagtcggttacttcattgagccagaagatttattcagtgcgatgattcgtgaaattgaaacgcaagatttcgatatcgaacacctggcgacggcaattcgtaaagttgaaacatcaacattaggtgaagaaagtgaaaatgactttatcggtctgttcagcgatatggatttgagttcaacgcgactaggtaacaatgtcaaagaacgtactgctttaatctctaaagtcatggttaatcttgacgacttaccattcgttcacagtgacatggaaattgatatgttaggtgatgcatatgaattcctaattgggcgctttgcggcgacagcgggtaaaaaagcaggcgagttctatacaccacaacaagtatctaagatactggcgaagattgtcacagacggtaaagataaattacgtcacgtgtatgacccaacatgtggttcaggttcactgttgttacgtgttggtaaagaaacacaagtgtatcgttatttcggtcaagaacgtaacaatactacatacaacttagcacgcatgaatatgttattacatgatgtgcgttatgagaacttcgatatccgtaatgatgacacattggaaaacccagcctttttaggcaatacatttgatgcggttattgcgaacccaccgtatagtgcgaaatggactgcagattcaaagtttgaaaatgacgaacgattcagtggttacggcaaacttgcgcctaagtctaaagcagactttgcctttattcaacacatggtacattacctagacgatgaaggtaccatggccgttgtactcccacatggtgtattattccgaggtgctgcagaaggtgtcattcgtcgttatttaattgaagaaaagaactacttagaagctgtgattggtttgccagcgaatattttctatgggacaagtattccaacatgtattttagtatttaaaaaatgtcgccaacaagacgacaacgtactatttatcgatgcatccaatgattttgaaaaaggaaaaaatcaaaatcatttaagcgatgcccaagtcgaacgtattatagacacatataagcgtaaggaaacaattgataaatatagctacagcgcgacactacaagagattgccgataacgattacaacctaaatataccgagatatgtcgatacattcgaagaagaagcaccgattgatttagatcaagtccaacaagatttgaaaaatatcgataaagaaatcgcagaaattgagcaagaaatcaatgcatacctgaaagaacttggggtgttgaaagatgagtaatacacaaaagaaaaatgtgccagaattgaggttcccagggtttgaaggcgaatgggaagagaagcagttaggggatcttacagatagagtaattaggaaaaataaaaacttagaatcgaaaaagcctttaacaatatccggacagttaggtttaattgatcaaacagaatattttagtaaatcagtttcgtcgaaaaatctagaaaattatacactaataaagaatggagaattcgcgtataacaaaagttattctaatggatacccattaggggctattaaaagattaactagatatgatagtggtgtattgtcctctttgtatatttgtttttctattaaaagtgaaatgtctaaagacttcatggaagcatattttgattcgacacactggtatagagaagtttctggaattgcagttgagggtgcaagaaatcacggattattaaatgtttctgtgaatgatttttttactattctaattaaatatccaagtttagaagaacagcaaaaaataggcaagttcttcagcaaactcgaccgacaaattgaattagaagaacaaaagcttgaattacttcaacaacagaaaaaaggctatatgcagaaaattttctcacaggaactgcgattcaaagatgagaatggtgaagattatccagattgggaaaatagcaaaatagaaaaatatttaaaagagagaaacgaacgttctgacaaagggcaaatgctttcagtaactataaatagtggcattataaaatttagtgaattggatagaaaagataattcaagtaaagataaaagtaattataaagtagttaggaaaaatgatattgcatataattctatgagaatgtggcaaggggctagtggtaaatcaaattataatgggattgttagccctgcatatactgtgctttatccaacacaaaatactagctcattatttattggatataagtttaaaacacatagaatgattcataaatttaaaattaattcacaaggattaacatcagatacatggaacttaaaatataaacaattaaaaaatataaatatagatatacctgtattggaggaacaagaaaagataggtgatttctttaaaaaaatggatatattgataagtaaacagaaaatgaaaattgaaatattagaaaaagagaaacaatcctttttacaaaaaatgttcttataactttgataaatacatagattgcataagaataaaatttgtataatttaacataaaagttgtaaaagtaaagtgaattaaaaacgaacattaaatttaggcactgtgaaagcgcagtgtcttttttgtgtcgaaattgtgtacagaataagtagttaaataaagattaagttgagataaagtgttattcgtaaataaaagagagtagatcgataggaattgaatgatattagttaactatttattaaattacttaataatgattaatttttagttaaagtaagtttaatgtgaagcacgaccattgctcattataatgaatgaggattgttcgtattgcgtaatagaataaatcaaatagactaaaaattgggagcatagaattatgaaattaaaaaatattgctaaagcaagtttagcactagggattttaacaacagggatgattacaactactgctcagccagtaaaagcaagtacattagaggttagatcacaagctactcaagacttgagtgaatattataatagaccgttctttgagtatacaaatcagtcaggatataaagaggaaggaaaagtgacgtttactcctaattatcaacttatagatgtaactttaactgggaatgaaaagcaaaattttggtgaagatatttctaatgtagatatatttgttgtaagagaaaattctgatagatctggtaatacagcttcaattggtggtattactaaaacaaacggttcaaattatattgataaagtaaaagatgtaaatttaataattactaaaaacatcgatagtgttacatcaacgtcaacatcatctacatatacaattaataaagaagaaatttcattaaaagaacttgattttaaattaagaaagcatttaattgataaacataacctttataagacagaacctaaagacagtaaaattcgaattactatgaaagatggtgggttctacacatttgaattgaataaaaagttacaaacacaccgtatgggtgatgttattgatggcagaaatatagaaaaaattgaagtgaatttataaaattattcgagggagcatatcatgagggaaaattttaagttacgtaaaatgaaagtcggtttagtatctgttgcaattacaatgttatatattatgacaaacggacaagcagaagcatctgaaaatcaaaacgctttaatctctaatataaatgtagacaatcaggaaaaacagaataatgtaaatcaagctgttcagcctcaaaataatactaatgaaacatcaaaagtaccggctaattttgtcaaattgaatgatattaaaccaggtgatacttctatacaaggaacaactttaccaaatcaatttatactattaactattgataaaaaagatgtgagctcagttgaagattctgacagcagctttgttatgtctgataaagatgggaattttaagtatgacttaaatggtcgcaaaattgttcataatcaagaaattgaagtgtcttcatcagatccctatttaggtgacgatgaagaagatgaagaagtagaagaaacttcaactgaagaagttggtgctgaggaagaaagtacagaagctaaagctacatatacaacaccgcgatatgaaaaagcgtatgaaataccgaaagaacagctaaaagaaaaagatggacatcaccaagtttttatcgaacctattactgaaggttcaggtattattaaaggccatacctctgtaaaaggtaaagttgctctatctattaataataaatttattaactttgagacaaatgctaatggtggtccaaataaagaagaagcgaaatctggatcagaaggaatctggatgcctattgatgacaaaggatactttaattttgacttcaaaacgaaacgtttcgatgatttagagttaaagaaaaatgatgagatctcattaacatttgcacctgatgacgaagatgaggcattgaagtcattaattttcaaaactaaggtaacgagtttagaagatattgataaagcagaaactaaatatgaccatactaaagtggaaaaagtaaaagtattgaaagatgttaaagaagatttacatgtagatgaaatttacggaagcttatatcatacagaaaaaggtaaaggtattcttgataaagaaggtactaaagtaattaaaggtaagactaaattcgcaaatgcagttgtgaaggtagactctgaactaggtgaaggtcaagaattccctgatttgcaagtcgatgaaaaaggtgaattcagctttgatgtagatcatgctggatttagattacaaaatggagaaacactaaacttcacagtagttgatcctattacaggtgaattattaagtggaaattttgtttctaaaaacatagatatttatgaatctcctgaagaaaaagcagatcgtgagtttgatgaaagaatggaaaacacacctgcatatcataaattacatggtgataaaattgtcggctacgatactaacggattcccgattacctggttttatccattaggtgaaaagaaagttgaacgtaaggcaccaaaattagaaaaataattaaataaaacagcttaatgatgtaatgaaattagtgagttaatcactgacttctacgtcattgagctgtttttttgtgctttgttacaaagcattattgaatttattttacgtgttcatattttgaaacatcaaagccgtcttgtttagctttgttgataatgtctttgattgaatgtagtcctttatcggcgaagtatgatcttaagttgtcttttgtagcttggtcagcattcttatctaataacacatcaatataacttaattcatgttctaagaagtttgcatcatcatgtagtacgagtccattttgagaataaactttcgcatctgcttgattaccatatccaacaacgccagttgctaaaacacctaccattgccgtagctactaaaacctttttaaatttcatatctatcactcctctaaaaattgtaactccatcataacactgaatattaagaaaattacgtttattaagtcgatttaataatttttaataaatagttaaagtgacaaatattgtttaaatgcaattaatctttaatacgatgcttgaggatttttcctaataaaaccttgatttcaaaaagggtttaaatcaaatgaaacaataataaaaaaatgacgcaatataataataagtacaagtttaattaagaaattaaattgattgtatatgtatattttggtaacgtaaaagagaaatatacaaaataattaattatttatatgaaaagagaatataaatgaagtataaaacagagagacgtgaagcgatgggatatttaaaaaggtttgcattgtacataagcgttatgattttaatatttgcgatagcaggttgtggcaaaggtaatgaaacaaaagaagattcaaaggaagaacaaatcaaaaagagctttgcgaaaacattagatatgtatccaattaagaatctcgaggacttatacgacaaagaaggataccgagatggcgaatttaaaaagggtgataaagggatgtggacgatatatacagatttcgccaaaagtaataaacaaggtggattgagtaatgaaggtatggtcttatacttagatagaaatacacggactgcaaagggacattattttgttaagacattctataataagggcaaattcccagatagaaaaaattataaagttgaaatgaaaaataataaaattatcttattagataaagtagaagatacaaatctaaaaaagagaatagaaaactttaaattttttggacaatatgcaaaccttaaagaattgaaaaactacaacaatggtgatgtctcaattaatgagaatgttccaagttatgacgcaaaatttaaaatgagcaataaagatgaaaatgttaagcaattaagaagtcgttataatattcctactgataaagcaccggtattaaaaatgcatattgatggtaatttgaaaggaagttctgtgggttataaaaagttggaaattgacttttcaaaaggtggaaaaagcgatttgtcagtaatagattctttgaatttccagccggcgaaggtagatgaagatgatgaatgatgaggatggtgtgtaacaatgaagtctataaaaaggattggattgtgcattagtttgttgattttaatcatctttgttacatcttgtgatggtgataataagatcattggagattcaaaagaagaacaaatcaaaaagagctttgcgaaaacgttagatatctaccctattaagaatctcgaggatttatacgacaaagaaggatatcgagatggcgaatttaaaaaagatgataaaggtacttggctaattagatctgaaatgaaaatccaattaaaaggagaaaatctggaatctagaggagcagttttagaaattaacagaaatactagaacggctaaagggcattatattgttagagaagttgttgaagatagcgatggaatgacacacaatcatacaaaaagatatcctgtgaaaatggaaaataataaaatgattccattaaaaccaatcgatgacgaaaaagtaaaaaaagaaatcgaagaatttaacttctttgtacaatacgggaatttcaaagaattggaaaactataaagaggacgaagtgtcatataacccagaagtaccaatttactctgcaaaatatcaattgaaaaacagtgattacaatgttgaacaattaaggaagcgatataatatcccgacgcaaaaagcgcccaaattattattgaaaggctcaggtaatttaaaaggttcatcagtcggatataaaaatattgaatttacctttattgaaaacaaggaagaaaatatttacttcacagatagtatctactttaatccaagcgaggataaataaatataattactaatataaaaaataacgttagaacatttaataataaagttaaaatgaattacatgtattaaattgaataagttagttttgtttgataacataaaagttgaataatcactattttaataagttgtatgaaatattcaaatgtttataaaattaaaacagagagatgtgaaatgatggagtatataaaaaaaattgctttgtacatgagtgtattacttttaatcatttttattgggggatgtggaaatatgaaagatgaacagaaaaaagaggaacaaacgaataaaacagattcaaaagaagaacaaatcaaaaagagttttgcgaaaacgttagatatgtatccaattaagaatctcgaggatttatacgacaaagaaggatatcgagatggtgagtttaaaaaaggcgataaaggtacgtggactatacttacaggtttttcaaaaagtaacaaaccaggagtattagatgatgaaggcatggtgttatatcttaatagaaataccaaaaaggcaacaggttattattttgtaaataaagtttatgatgatattagcaaaaatcataatgagaaaaaatatcgtgttgaactaaaaaataataagattgttcttttggataatgtagaagacaaaaaacttaaacaaaaaattgaaaattttaaattttttagtcagtatgctgattttaaagatttaaaaaattatcaagatggaaatataacaactaatgaaaacgtaccgagctatgaagcacaatataaaatgaacaatagtgataaaaatgtaaaaaaacttagagaaatttatccaattacaactaataactctccaaatctaaaattatatatagatggtgatataaaaggaagctcagtaggatataaaaaaatagaatataaattttcaaaagataaaggtcaagagacaacattaagagattatttgaattttggaccgtctgaaggtgagaatgttgagtaggaagtataaaatagatttaaaagcaattaatcaaaatactgagtctacaagtgctatttcgaaagcgtcatacgaagttgagaatgctaataataatggtctatcaaaaagagacgtgattaatcaatttaatgatttgaaaaaaatgaaaaaattcccttctaatcttgaatatgttgatagttacactgattctcttactggagtaacaacttctgcttttttaaataaagatacaggcaaagtaactctcgggatgactgggactaatttacaagacgaagcctttaaaaagttaaaagaaggtgaattttcaagacaaaatgttaccaatgctttggaaacagttaaagatggatatgcagatcttaaaatattatattctcctgcatctgatcaaaactatagatatgcgaatacacaagaatttataaataaaataaaaagtaagtatgacattgattttattactggacattcactaggtggaagagatgcggtagttctaggaatgagtaatggtattccgaacattgtggtttataatccagctcctatttctataactagtttgaatcctaattccccagatggaaaacgtttattagaattatataaaaattataaaggtaatattactaggtttgttgcagaaaatgatgcattgacagaaaatctgaagaaatataagcattatgtttttttcggtaatgataaagtctttaaaaatggtaaaggtcatgaaatggaaggctttctgaccgaagaagaacaaaaagctataaaaaaagaacttaaaaaactacaaggttatgcagaagaaaataataagtcatttgtaaagaattcaaataatgctatctctaaattagctagtatagaattacttagagcaaatatgatgactacaaatggaggaggattatcttcttcgcagcaaaaagttttagaaagtttaacagctttaacaattgcgcagtcattcagtcaactgatagacgatgaaattaatcaaatcaaaaaaatgtataatgaaaagaaaaagaaatttggaaaaaattgggaagacgctcaaaaagctggaaaagctgtaggtgaagatttgagtgtaaatggagttctcaatgctttagatgaaggtcaagtgaatgaaagtagtatggtaagagaacctgaacaaatgatatctgcaaaagaaagacaactttcaacgatagggtcttctgtatcaaattatattatgagagttagactcagtattaatgaaatcgttgataaagatcaagtgcttgcatcacaaataggtggattactatgatgtttaatcaaattaataataaaaatgaattagaagaatcatatgaatctgagaaaaaacgtatagagaatgaactgcaaaatttaaatgaacttaggcatagaactcgaaaagaaaatgaacgtagttatgatgtttttcaatatttgaagcacgaaatgaattatagtgaagatgcccaaaggaaaatgacgagaaatatagaagcgtatgagcaagaaatcaatgagataattagaaagcaagaatggaaattagaagaatataaagaagacttaaaaaagtcttatgaaaagcagttagataagctaagtgactgataatttggaggagattaaatgactctaatagaaccagatatgaccttaagaatgccagatataagtactacagtagaaacacttaatctcatatctaaaatggaagcgcaaaaagaaaatattcgcacagttattgcacctgaacataagcataaatacaaagatattgaaaacggattaaaaggtgaagaaaaagtattaattgaacaaatggcgcaacattgcgaagcttttaaagctaattttaaaggtgcagctcaaggagattgggttaaaagtgccatgtctgagatagacagcattaaggatgacctgaaaaaaattaatagctaaactacatatcatactactaaataaagcgaccaatgttcagtatattcacaactgacactaggccgcttctttttaatttatattattcccatgtaaagtaattcgaaccgaatcgaaatatcacactctcaattgtaaaaaaacaacttaaattactgtcccgcattaaacatgaccacattcgtaacagcaacaataaaaatcctcaagtactaaaagctatgatcactttatcaaaatcaacgcaagttaacctctcccgaactacccgttactcatcaccttcaccttacaaaccataaagcgctgcagttaagtattgaatggcatagccaattgaaatgaaaatagcaatcgttataatagcactgccaatggtatataaagtatgtttcgtagataatccttcagtctttgaaccaaaaacactgagtagaataaatgcaataccagtaacatataaaactaaaatgacaaataacatgtttatacacctcgattctctttcgtgagatatatctttgtctccattataaagtaaagcgctcaataatttaattaagtatactatttttttattatcgaagattgcgaaagaggaaacgctcctatataatgtaaaacagaattattcctatttacaaataaattgaagtgagggtatatatatggctaaaattccagttacggtattaagtggttatttaggctcggggaagacaacgttgttaaatcatattttacaaaatcgagaaggtcgacgtatcgcggtaattgtaaatgatatgagtgaagtaaatatcgataaagatcttgtcgcagatggtgggggactatcgcgtacagatgaaaaattagtcgaactttctaatggttgtatctgttgtacacttagagacgatttattaaaagaagttgagcgtttagtgaaaaaaggtggcatcgatcaaattgttattgagtcaacagggatttcagagccagtacctgttgcacaaactttctcatatattgatgatgaacttggcattgatcttacagcgatttgccgtttagatacaatggttacagttgtggatgctaaccgcttcgtacatgacatcaactcagaagatttattgatggatcgtgatcaaagcgttgacgaaacagatgagcgttcgattgctgatttattaattgaccaagttgaattttgtgatgtattgattattaataaaattgatttaattagtgaagaagaactagcgaagttagaaaaaatgttaagcgcattgcaaccgactgctaaaattattaagacaacaaattctgaagtagatttaaaagaagtcttgaatacgcagcgttttgattttgaaaaagcgagcgagtcagcaggatggatcaaagaacttgagtctggtgggcatgcatcgcatacacctgaaacagaagaatatggtatatcatcgtttgtatataaacgtcgtctacctttccatgctaaaaggttcaatgattggttagaaagcatgccaaataatgtcgttcgatcaaaaggtatcgtatggctagcacaatacaatcacgtagcatgtttattatctcaagcagggtcatcttgcaatattcatccagttacatattgggtggctagtatgtctgaagcgcaacaaacacaaatattagcagaacgtcaagatgtcgcagctgaatgggatccagaatatggcgatcgtcatacacaatttgtcattattggtacagaattagatgaagaaaaattaacaaaagaactcgacgcatgcttagtcaatgcgcaagaaattgatgcagattggcaacaatttgaagatccatatcaatggcaaattagaccagcacgataagttgaatgaagtataatcatttttgaattgtggcttaattgtttgcaatttatgacaattaataaaaagttaaggtgttcttaggatctttttgttttcaatctatctaaagtgtgatagttttgataaagcagaaatttgcattttatccatagggctaggacatgtatgtgtcttagtcctttttatatttacgttgatgaaaaatggcaaaaccatcgtaccaactgttaattgaaggtacaatcattgtttaacagtcataaaaatgagtgaagtaaatgcagctatcaatgtactattaacacttacggtcacacgagtgtttcagtctaaacgtgcaacgcaattccgcacgtggccaatatatcttgcgctagatcatgaaaatcattaagatttcgcatgccaaatcatgaatgtctcagaactcgagtatcaaacataaaacacgccacaaaaatataacgcgtcagactacaaagatcacgaatattccgtatgtcccactaagaacgtcctatacaaaaaacaccaagaccatttatttgcaacaaactaacaagactcacctcacatcaataaatcaacacaaagcaaagccaccatccctattggtatagtggcctgagaattttaagtattcaattcgcttaaattattttgcgaaaatgtcgataattgctttgatgattttaatgatagtacctacaatagccatcgttttgtcctcctgtatgttgatttaacatagtgatgagttgttgatcgttaatgtttgagattagttgttacctaaaaatttaccaagtaaatctttaaagaatttgaataatttttggtacgaattccatgtgaatggcccccttcaaataagatgttcatatctatgagatttttataacttacttaccagtgaatttctcaattaatcctttaatgaatttaatgattcctgcaatgatacccatgtgaaagacctcctttgtttgttatgaaatcttatttaccagtgaattgttcgattaagcttttgataactttaatgatgccagcgatgatacccattaagattacctcctttgcttatgagttaacttcattgtacatagttatcttgtgcgtaattgatttttttcctaacttgaattgttatgatcataactgcgaattttttattttaaaaggacgggaaatactgcctaactgtacaggtgcatttacaaaatctttacaatcattggtttaatagaggttaagctcatgaatttgacatgaagcagaaatttaattatattttatgttataagtttaaaacgaataacacgttaggtctcgtctaggcaaagcatatttatgaagatgaattgaacagacagaagtaacattttatatacatatgtgcatgggagcacgcttaaagagaacactgcaacaaggtatatcaacgtaccgtgatgcagtgtctagttaaactgaaacctgcaatagtaaattttctgccattatgtacagaatctactattgtaggtttttatttttatacataagcaattatgcgagagattagaaataaggaggttatgcagtgttaagttttcaattgctattttcactgtttgttattgcgcttatcattgcattgataagtggcttgttgtttttagcaccagttatgccaatgagatatattaaattacatttatacatactagtcatgccagtattatttgcagtcattggctttttcggtattcatggtcaacatgtcttaggtccatttaaaatagatcgtttatcttggttattagctggctttgtaatggcgcttggctttattattcaaaagttttcaatgcgatatttactaggtgatcatcattatagacattactttccattgttcactgcgattacgtcgtttgcatctttagcatggatgtctgaagacttaagactgatggcactctgctggggtattacattattatgtttaacattgctgatgaacgttaatcgtttttggaaagtgccacgtgagtctgcgaaattatcaagcatgacatttttatgtggttggcttgcattcgttggagcaattgtaactatttatattgcgactggcgagtggcgggtaccacaacatatagttcatccgacatggtcattgttgacgaatgtactacttgtattagctgtcatgataccggcagcacaatttccttttcatcgatggttgattgaatctgtaacggcaccaacgccagtatcggcaattatgcatgcaggaattgtgaatgcaggtggtgttattctaactcgttttgcgccgatatttgataatggatttgcgttatcattattacttatcctttctagtatttctgtattgttaggatcgggtattagcttagttcaagttgactataaacgccaattagtgggctctacgatgagtcaaatgggctttatgttagttcaatgtgcattgggtgtatattcagcagcgattattcatttaatattgcacggtatttttaaagcaacattatttttacaatcaggttctatcgtgaagcgattcaatattccaaaacaagcatctgctaaagacgcttatggctggattgtcatgggacgtgtattagctattatcgtggcatttctattttggatgagtagtgacagaagtgcatatgaagtgttaagtgcactcattctaggatggtcattacttgtatcttggaatcaaatggtagcctttagtaaaggacgcatggcacgtcttgttggtatgattttgattgcaatcgtgacatttatctacgtcatcacacataattatttttacgctgtattacaaaatataacaacacatgcgacaacgccgcctacagtgagtgtcatcattagtgttgttattttaatctttggcagtttattaagtatttgggtggcgcggcatcgatactctaaggcttttgcggtattgtacgtgtggttagttaatctaggtgaagcacgctcgaaagcgatagaaagtcatccgaattatttgaagaagtatttataggaggtgaaaggtatgacaacacagttaaatatcaattcagtcattgaaaatgcgaaacgtgttattacaccattatcaccaatttcgatttttgcagcacgaaatccatgggaaggattagaagcggatacgtttgaagatgtcgcaaaatggttacgtgatgttcgagatgtggatattttcccaaataaagcattaatagaaagcgctgtggcacgtggtgaattagatgaaagtgtctttaatcaacttgttactgatatgttacttgaacatcactacaatatcccgcaacactacatcaatctttatattgataacattaaaacattaaaagacgtacctgcatcatatatgaatcattcaaatgttgatgttgttgctgatctactattagaaaaatcaaaacgtgatatggctgaatcatatcatcactatgatgtacgtccgatgagtgatgcaataatagatgaacaaggtgagccacttagcgaacaagtgaatcgtcaaatgattaaatggacgaaactttatatcgatcaatttctatcgagttggacaatgccgaagcgtgagcaaagtttttaccatgcatggttgcatttagcgcaacatgaccatagttttactaaagcacagcgccaagtgattaaaggcttacccaatgatcctgaaatgacgatagagtcagtattaactcatttttcaatagatcaggaagactaccaagcttatgttgaaggacatcttttggcgttaccgggttgggcaggtatgttgtattaccgttcacaacagcatcactttgaacaacatttgttaacggattatttggcaattcggttagttgtcgaacaattgctagttggtgatgagtttaagtcagtcgctaaagattgtgaaagtagatcggaaaattggtttaagcaaactgttgcatcatggtgttactacagtgatatgcctagcgatgtattactacaacatgacgtcaatgaaattcaaacgtttattcattttgcagcaactatgaataaaaatgtatttaaaaatttatggctaattgcctgggaaatgacatacgaatctcagttaaaacaaaaaattaaagcaggtcatgaaagtgtggcgggcgcattagatgtaaaccaagtaaatgtctcagaaaatgataacgctaatcagccacattcagtattgttaaatgacacacaagcagttgatgaaaataatagcgagctaaatcagatgggcacatcaacgaaagcgcaaattgcattttgtatagatgttcgttcagaaccatttcgtagacatatcgaagcagcagggccctttgaaacgattggtattgcaggcttctttggattacctattcaaaaagatgccgtagacgaacaattcaaacatgattcattacctgtcatggtaccgccggcatatcgcattaaagaatttgcagaccgctacgatatgaatgtttatcgacaacagcaacagacaatgtcatcgatgttttacacatttaaattgatgaaaaataatgtcatgcctagtctgttattgcctgaattaagtgggccatttttaagcttaagtaccattgtcaattcgattatgcctagaaaaagtcgcgcgtctttacaaaaaataaaacaaaagtggttgaaaaagcctgaaacaaagttgacgattgatcgtgagtttgaccgaacatcagacttacctgttggatttactgagcaagagcaaattgatttcgcgttacaagcgttgaaattgatggatttaaccgaagcatttgcgccgttcgttgtgttagcaggtcatgctagtcattctcacaataatccacatcatgcatcacttgaatgtggggcttgtggtggcgcatcaagcggttttaatgctaagttattagcgatgatatgtaatcgtccaaatgtcagacaaggattaaaacaatcaggtgtgtatattccagagacaactgtttttgcggtagcagaacatcatacgtctactgatacgttggcatgggtatatgtgccagacacattatcttctattgctttagatgcatatgaatcattgaatgacgcgatgccgatgatttctgaacacgcgaatcgcgaacgtttggacaaactgccaacgattggtcgtgtgaatcatccagtggaagaagcgcagcggtttgcgagtgattggagtgaggtacgtccagaatggggattggctaaaaatgcatcatttataattggacgacgccaattaacaaaaggcattgatttagaagggcggacatttttacacaattatgattggcgtaaagataaagatggcacattattaaataccatcatttctggtccggcacttgtggcacaatggattaatttacaatattatgcgtcgacagttgcgccgcatttttacggaagtgggaataaagcgacacaaaccgtcacgtcaggtgttggtgtcatgcaaggtaatgcgagtgatctgatgtatggcttatcatggcaatctgttatggctgctgatcggacgatgtatcattcgccaattcgtttacttgtcgttattcaggcacccgactatgttgtagcaagactactcgcgaataatgagcatttcgctaggaaggtgtctaatcattggctgcgtttaatgagcgttaatgaggaagggcgttttaaaagttggatttaacgatgatatgttgcgatgctaagtaactaatatatcatcatatctacaatgttctagcttcttaaaatatactaaaaatgataaacttaatgtaatagttgatgtcgtgataacgatacaaagatgaagtaatcaattttaatattattggagttagtgatatgaaaagaacgaaaggtgaaatcgaagctgaaatcagtaaagccattacgcaatgggaaaaagatttccttggcagaggttccttgtcagttaaatcagacattttaagagatatggtgattattagtttacaaggtatcttaacgccagctgaatatcgtgtatgtagtacgaatgaaggattattaaatattaaacgaacacgttctgaattagttgaatccggtgagcaagatttgaatgatatcatttttaaaattacaggtatcaaagtgatgagcttccatagtgatttaagtacagttacaggtgaacgtattatcgtattcaaacttgaggataatttggaaaagcatatttaagaaggttaggtatgcttctgctggcttattaaagctatagaagtatgcttggttaaacagcgcaacgccatatatttgggtgtgctgtttttctattacatgatgtgtttattacgtggatgaatgcgtgggtctgaatatagcccgtgaaaggcgtatgtcataaaatttgcgaatggtgacaagtcgacgcaagcatatttgttgcgagacatgcccactatccttttacataaagagtatatgtgtgacgtaggcatataatcgataaagtattcctaaaaaattaggtataatgaccattgttgcaataagtttttcggccttgaaaccgataacgcatagtataataggaataaaatataatacaaatatccagtaaatcaaatttgaaaatgatggatgaataggggtaaagaatctaactaatgtaatgattaacgctatatagacaaaaataactctattgatacgccttaccccctctgtataataaatataaatcgtactaaattgaaaatagcaaaatattgttatttcaattatacaatgttttatttgcaatatacataacaatatgaactttataattttgatattgtcggtaaagtgaaatttgtggcacattgatattatggataacatttgtaaaatgaaaatgatgatacgaggagattgtaagatgatagataaaaaattaacatcaccgaaaatgacagtgcctttatttttaatcgcgctgattgtatttataggtatgttttacagtgtagtgacaaatcaagaatggcttaaaaatatagatatgggatcattaacatggtttacagattatttcggtgagccacaacgtcagtatgttaacaatttgtttaattactatatgacgtttagtgcggaaattggagatgtcaaaggtgtcgtgttgatttccattatcgtcacaatcatactgtttattaaacagaggcatttagcggtttggtttgtgacatatttggtttcaggtgtcatcatgaacaaattaattaaagatactgtattacgtccaagaccatataatcatttagccgttgatacaggcttttcatttccgagtggacattccaacgccagcacattattatatttcgccttaatgatcattattatttcacttgctgctaagacaataacaaaagtgttgagtgcgttggttatgggaatattatggcttagcatattattttgtcgcctttattttcatgcacattacttttcagatgtcattggcggcacgtcactagcaatcatttgggtagcgttattcttaatggtatacccatactttattaatcatcgacgacaacgcgtttagcaaacatctttagacatagtggaggtatatagaaaaatgagaattaaaacaccgagtccatcgtatttaaaaggcacaaatggacatgcgatattattattacattcatttacaggtacaaatcgggatgtgaagcatcttgcagctgagttaaatgaccaaggatttagttgttatgcaccgaattatccaggtcatggtttattgttgaaagatttcatgacatataatgtagatgattggtgggaagaagttgagaaagcttaccaatttttagtcaatgaaggttatgaatctatcagtgcaacgggtgtgtctttaggtggattaatgacattaaaattggcgcaacactatcctttgaaacgtatcgctgtcatgtcagcaccaaaggaaaagagtgacgatggcttaatagaacatttagtttattatagtcaacgcatgtcgaatattttaaatttagatcagcaagcatcgagtgcgcaattagcagcaattgatgattatgaaggtgaaattacgaagtttcaacattttattgatgatatcatgacaaatttaaatgttattaaaatgccagctaatatattatttggtggtaaagatgcgccatcctatgaaacaagtgcacattttatttatgaacatttaggatcagtagacaaagaattaaatggtctgaaggattcgcatcatttaatgacgcatggagaaggcagagatattttagaagaaaatgttattcgctttttcaatgctttaacataattgaagattttaaaaattaacacttgagtgacgatgttattatatttgtcatttgagtgttttttgtggcgtgatagtatagggaacttagctaaagttaatttgtagtgtgatgtcgtggaaatattatggagttataccagaagttgatttgtattgtaatgtcgtggaaattttatgggcattgcacctgaagttgttatgtggcgagatgttggggatatagatggtgttgtatgtggcgagatattggcgcacgtatacagcgttgaaccagaaaatttaatgtagcgtaatgacaacacattacaagagttgattatattatgataaatccaggtgctaccgtattaatgaaacaattttgatgcaggtgtattgcatgttatttacatacatgttagagtgttacttaaacacgtagacgctttaacgctttaaaggagatgtgaatgatgaaaagacaacaatcacaatggaagtcatcaactggatttattttagctagtgcgggttctgcaatcggtcttggtgccatgtggaaattcccatatatggcagggatttatggcggcggtgcctttctagctatgttcttaatattcaccatttttgttgggttgccattactcattatggaattcactgttgggaaaatgggacggacatatacaacacaaatatatagtaaattaactggtaaaaaatggctcaatatcattggctggaacggtaatttggcagtgtttattttatttggcttctatagtgttatcggtggttggattgtcatttacatcggacaagtattatggcaattagttatatttcaacgcatcaatcatctccaagaaatgaattttgaagcggtaatatcaaatccttggttaaccgttctagggcaaggtatattcatattcgctacgatgattattgtcatgttaggtgttgaaaaaggattagaaaaggcatcgaaagttatgatgccattgctgtttgtctttttaatcgtcattgtgattaagtctttaacattagatggcgtcttagaaggtgtgaaatttattttacaaccaagagtatcagagattactgctgatggcatcttgtttgcgctaggtcaatcattctttacgttatcattaggaactacaggtatgattacttatgcgagttatgcctctaaagacatgacgattaagtcatcagctatttctatcgttgttatgaatatctttgtatctgtattggcaggtctagctatatttccggctttacatagttttggctatgaaccacaagaagggcctggattattatttaaagtactgccaatggtctttagtcaaatgcatctaggcacattattctatttgggattcttagtgctgttcttatttgcggctttaacgtcatctatttctttattagaattaaatgtttctaacttcacgaagaatgacaatacaaaacgtaaaaaagtcgcagtgatcggtagtattttagtatttatcattagtattccagcaaccttatcttttggtatcttaaaagatgtaagattcggtgcgggaacgatttttgataatatggatttcatcgtttcgaatgtattgatgccattaggcgcattaggtactacgcttgtcgtaggacaattattagataaaaaattattacaacaatattttggtaaagatcgatttagattattcagtggttggtattacttaattaagtatgcgatgcctgtcgttattattttagtctttatcgtgcaattatttagttaatatatagaagcatctgacacacaagtatttgtgttgctcaggtgtttttttgtttggaattgaaaatttagtactggttctgaattaatcgaaacttagataattgcaaaataacaaaatgtcgtttataattcttatctgaaaagtaagaattaaaattgagacatgaagaaaggtttcattcatttgatcggcatgtcagatgagggtgcatctatgattacttatgatttaattggcaatacaccattagtactgttagaacattatagtgatgataaagttaaaatttatgccaagcttgaacaatggaatcctggaggcagtgttaaagacagactcgggaaatatttagtagagaaggcaattcaagaagggcgtgtgcgtgcaggtcaaactattgttgaagcgactgctggtaatacaggcatagggttagctattgcagcgaatagacatcatttgaaatgtaagatctttgcgccgtatggtttttcagaagaaaagattaatattatgatagcgcttggtgcagaagtttcaaggacgagtcagtctgaaggtatgcatggggcacaattagctgcacgttcctatgctgaaaaatatggtgccgtttatatgaatcaatttgaatccgaacataatccggatacatattttcatacattgggacccgaattgacttcagcattacagcaaattgattattttgtggctggtattggctctggcggtacatttacaggtaccgcacgttatttaaagcaacatcacgtgcaatgttatgccgttgagccagaagggtccgtgttaaatggagggccagctcatgcacatgacactgaaggtatcggttctgagaaatggccgatatttttagagagacgtcttgtagatgggatatttacgattaaagatcaagatgcctttcgaaatgtcaaaagtttggctataaatgaagggttgttagtaggcagttcttcaggtgcagcattacaaggtgcattgaatttaaaagcgcaattatctgaaggtacgattgttgtcgtatttccagatggtagtgatcgatatatgtctaagcaaatatttaattatgaggagaataataatgaacaagaaaactaaattaattcatggtgggcacacaacagacgattatacaggtgccgttacaacaccaatttatcaaacaagtacatatttacaagatgatattggtgatttacgtcaaggatatgaatattctcgtactgcgaatccaacaagaagttctgtagaaagcgttattgcgacattagaaaatggcaaacatggctttgcatttagttcaggtgttgcagcaatcagtgcagttgttatgctgttggacaaaggagatcatattattttaaattcagatgtatacggcggtacttatcgcgcattgacaaaagtatttacacgatttggcattgaagtggattttgtagatacaacgcatacagattcaattgtacaagcgatacgcccaacaacaaagatgttgtttattgaaacaccttctaatccattattacgtgttactgacattaaaaagtctgctgaaattgcgaaagaacacggtttgatttcagttgttgataacacatttatgacaccttattatcagaatccattagatttaggtatcgatattgtcttacattctgcaacgaaatatttaggtggacatagtgatgtcgttgctggtttagttgcaacatcggatgacaagcttgcagaacgtttagcatttatttcaaattcaacaggtggcattttaggacctcaagatagctatttacttgtgaggggtattaaaacattaggtttacgtatggaacaaattaatcgcagcgttattgaaattattaaaatgttacaagcacatccagctgtgcaacaagtgttccatccaagtattgaaagtcatttaaatcatgatgtccatatggctcaagcggatggccatacaggtgtgattgcatttgaagtgaaaaatacagaaagtgccaaacaattgattaaagcaacatcgtattacacattagctgaaagtttaggtgcagtggaaagtttaatttcagtacctgcattgatgacacatgcatccattccagcagatattcgagctaaagaaggtattacagacggacttgtaagaatttctgtaggtattgaagatactgaagatttagtcgatgatttaaaacaagcactagatactttataaataatagcagcactggcatatattttgagttcaacgtttgttgttcttgaatatgctagtgcttttttgtgcgatgttaatatttagtaattgcgttgtggaggattggtggacatttttatggatttaatttgataaatgtcatagtagtctcacaattcgtcattgtcacatgaattacttattttttaattttttagaaaattcggcaaattgtattgacgatatatgcaattttacatataatgctcttattcctagtggattaataagaatttgtaggaggggcgatgatgattgagtttcgacaggtaagtaagacctttaataaaaagaagcaaaaaatagatgctttgaaggacgtatcatttacggtcaatcgcaatgatatttttggtgtgattggatatagtggtgcaggaaaaagtacgttggtaagactcgtgaatcatcttgaagctgcctcgaatggacaagtgattgtagatggacatgatattacgaattatagcgataaaatgatgagggatattaagaaagatatcggtatgatatttcagcatttcaatttattaaattcagctaccgtatttaaaaatgtagcaatgccactcattttaagtaagaaaagcaaaacagaaattaagcaacgagtaacggaaatgcttgaatttgtaggattgagtgataaaaaagaccaatttcctgatgaattatctggtgggcagaagcaaagggtggctattgcaagagcgcttgttactaatccgaaaatactcctatgcgatgaagcaacaagcgcattggatccagcaacgactgcttcgatattgacgttattaaagaatgtcaatcaaacctttggcattacaattatgatgattacacatgaaatgcgcgttattaaagacatttgtaatcgtgttgctgtaatggaaaaggggaaagtggttgaaacaggaactgttaaagaggtgtttagtcatcctaaaacgacgattgctcaaaattttgtgtctacagttatacagactgagccaagtacatcattgattcgtcgattgaatgacgaacaagttggcgattttaaagattataaaatcttcgtcgaggaaactcaggtgacacaaccgattataaatgacttgattcaaatttgtggcagagaggttaaaattttattttcatctatgtcagaaatacaaggtaacaccgtatgttatatgtggcttcgatttaatatggatcaacaatttgaagacacggcaataaatcaatatttcaaagagaaaaatattcaatttgaggaggtgcattaacatatgtttggttctgatttagacagtgcacagttattacaagcattgtacgaaacgctatatatggtatctattgctttatttttaggagcagtgattggtattccattaggtgtcttattggtaattactcgaaaacaaggcatatggcccaatatagtgatacatcaagttttaaatcctttaatcaatattttaaggtcactaccatttattattttgttaattgcgattgtgccattcacaaaattagtagtaggtacttcaattggtacgactgctgccatcgtgcctttaacagtatatgtggcaccttacattgcaagacttgttgaaaactcattattggaagtagacgaggggattattgaagcggcgaaagcgatgggcgcttcaccactacaaatcattagatattttttaattcctgaagctttaggttcgttagtattagcaattaccactgcgattattggacttattggaagtacggcgatggcaggagctgttggcggtggtggtataggagacttagctttagtgtatggttatcaaagatttgatacgacggtcattattattaccgttattgtattagtcattattgtccaagtgattcaaacgctagggaatgttctagctagattcatacgtagacattaatgatatatagtgaagattttgaaaggaattgatagaatgaaaagattgattgggttagttatcgtagcacttgtattattagcagcgtgtggtggtaacaatgataaaaaagtaacaattggtgtcgcatcaaatgacactaaggcttgggagaaggttaaagaattagctaaaaaagatgatattgatgtggagattaagcacttctcagattacaatttaccgaataaagcattaaatgatggtgatattgatatgaatgcattccaacattttgcatttttagatcaatataaaaaggcgcataaaggaacaaagatttcagcattaagtacaacagttttagcaccgttgggcatttactcagataaaattaaagatgtcaaaaaggttaaagatggtgctaaagttgtcattccaaatgatgtgtcaaaccaagcacgtgcacttaaactattagaagcagctggtttaataaaactgaaaaaagatttcggattagcaggcacggtgaaagatataacgtcaaatccaaaacatttaaaaattactgcagtagatgcacaacaaactgcacgtgctttatctgatgtcgatattgcagttattaataacggtgtagcaactaaagcgggtaaagatcctaaaaatgatccgatatttttagaaaaatcaaattcagatgcagtaaagccatatattaatattgttgcagttaatgacaaagacttggataacaaaacatatgctaaaatcgtagaattgtatcattcaaaagaagctcaaaaagcgttgcaggaagatgtcaaagatggagagaaacctgttaatttatctaaagatgagattaaggcaatagaaacgtcattagcaaaataaattatattgcgtcctacaagcaaagttcatgcttatgtttgtagggcgttattgttggagaataaaattatttccaatagagaaagggattgtaatcattttatagtgaaatattatgaaattgtaataatttagatattgtaaaatctaataagttgtaataattttaagggataattataaaatttgatgatacagtatatgatttttttgtaatcataatgtcatcaaacatcaacctattatacataataaaatcgtataatgatgtagtattcataaattcggataaaagaatgttaggaaagttaagcaagaggaggattttaaagtgcaaaaaaaagtaattgcagctattattgggacaagcgcgattagcgctgttgcggcaactcaagcaaatgcggctacaactcacacagtaaaaccgggtgaatcagtgtgggcaatttcaaataagtatgggatttcgattgctaaattaaagtcattaaacaatttaacatctaatctaattttcccaaaccaagtactaaaagtatctggctcaagtaattctacgagtaatagtagccgtccatcaacgaactcaggtggcggatcatactacacagtacaagcaggcgactcattatcattaatcgcatcaaaatatggtacaacttaccaaaacattatgcgacttaatggtttaaataatttctttatttatccaggtcaaaaattaaaagtatcaggtactgctagctcaagtaacgctgcgagcaatagtagccgtccatcaacgaactcaggtggcggatcatactatacagtacaagcaggtgactcattgtcattaattgcatcaaaatatggtacaacttatcaaaaaattatgagcttaaatggcttaaataatttctttatatatccgggtcaaaaattgaaagtaactggtaatgcatctacgaactcaggatctgcaacaacgacaaatagaggttacaatacaccagtattcagtcaccaaaacttatatacatggggtcaatgtacatatcatgtatttaatcgtcgtgctgaaattggtaaaggtattagtacttattggtggaatgctaataactgggataacgcagcggcagcagatggttacactatcgacaatagacctactgtaggttctatcgctcaaacagatgtaggttactatggtcatgttatgtttgtagaacgtgtaaataacgatggtagtattttagtttcagaaatgaactattcagctgcaccaggtattttaacttacagaacggtaccagcttaccaagtaaataattatagatatattcactaaagtcttacgtatataaatatataatgaattcctattacatttcacaagctgaaaagttggattgaatcctaaattttatggcggggctatcaaagtcgtgattgttgtaataggaatttttgtatatgaaaaaggattggtcgaatgaacttcatgttctatgttcgaccaatccttttctgaattagtattcatgttttactttgcgaatgcttgtaaataatctagcaccgtttgttattaaagtaacaactgccactgcttttttgaacttacgtggtgacttaattgaaatgtaaaagtctaacacggttcctacagtgcttaaacctaatgaaagatatactaattttttatttttagcatgatatttatagccattgtagccgtcgactatgaaacctgcgacatttagtaaacttgataaacgttgtgatttggaacgttttgccataataataattccccctagtatcttctgtttatatgaaaagttgggtgcgctgaattgctaacgttttgcgctataactactcatatatgataacataattgtacagtataatttgaaaaattgatttcacaaagttggggtgtcaaagatgattaaatgtgtctgtttagttgaagaaacagctgataaaatattgcttgttcaagtaaggaatcgcgaaaagtattatttcccgggtggtaaaatagaagaaggggaatcacaagtacacgcgctgttaagagaagtaaaagaagaattaaatttaacattaacaatggatgaaattgaatatgtcgggacaattgtaggtcctgcatatccacaacaggatatgttaactgagttaaatggatttcgcgcattaaccaaaatcgattgggaaaacgtaactatcaataatgaaattacggatatacgctggattgataaagataatgatgcgttgattgcgcctgctgtcaaagtttggattgaaacttatggtggtaaacatgacaaataatgacaccatcatgttacgacattatgtcccacaagattattcgatgttagaagcttttcaattaagtgaaagtgatttgaagtttgttaaaacgccagaggaaaatattacagctgcaatgtctgataatgaaaggtatcccatcgttgtaatggatggcaggcaatgtgtggccttttttacattacatcgtggaaaaggggtcgcaccatttagcgataaccaagatgcagtatttttcaggtcatttagtgttgatcaacgttatcgtaatagaggaataggtaaagtggtaatggaaaaattggcgtcatttatcacttcaacatttcaggatattaatgagattgtgttaacggttaatactgacaatccacatgccatggcactttatcgccaacaaggatatcaatatatgggagatagtatgttcgtcggaagacctgttcatattatggcgttaactataaaataaattaaatttaaaagcatctttactcatcgtcgaccacaacaattaatgatgaataaaggtgctttttgttatagatcatcggacaatttactatagtaaaaagcgacctagtgaacaattgacatatatccacaggtcgcttaacttaagttatattgctagttgcgattaattgatagactcatcatttttgcgctgtcgagatggtctttttattaaaaatgccgtaatccaagccgtaatcggaatactgattgcaacggcaataccgcctaaaataatagaaataaattcttgggcaaatattttcgagtttataatatgaccaaatgaatatttaagtttgaaaaaccaaataaataaagcaagttggccaccaaaaaaggcaaggtaaatcgtgttcgcagatgtcgctaaaatttctctaccaacacgcatgccagattggaataattcgtattgcgtaagcgttggattcacttgatgcaattcataaatgggtgaactaatggtaattgttaaatctatcacagctgcaataacagcaagaataatagtgaacaccataaattgaaccatatcaatgccaatattcattgaatacacatatgtttcatcttgttgttcggttgaaaagccttgtagatgaccgaagtagaccgataaataaatgagtgtaatcaacaatattgttgtaacgatagtgctgataaatgcagcttgtgttttaacattgtaactattgagtacgaataaattacaagcgccaataataatgcagaaaaagaatgtgacgacataaatcggtacgccaaaaataatcaatacaatactaataattaaaatagcgaaatttaaaaatagggttaaataagagatgaatccctttttacctccgaaaattatcatcagaaagaggagcaataacgccaatataaatacagcattcattgtttcgccctccttaatgtttcaaatatttccataaacaatattgtgataggaattgtaagtacgatacctataccacctgttagtgcgcgcgcaatttctaacgaccaattcatcgaaatagtataagtcactgtattggcattttttaaaaagattaaaaacataggtagtgcaccggataaatatgagaataataagatgttagtcattgttcccataatatcttggccgatgtttcgcccagcaagcgcccatctcctcattgaaatgtgtggcgtacgctgtaaaatttcatgcataccactagcaattgtaattgcaacatccataatagcgccaagtgaacctattaacactgaggctaggaagatatctttcggtggtaatgataaaaagttcatcgtttcatatttaatgcctttaccatctgtcatatatatgattaattctgttaaacctatactcaaaaaagttccgataattgtactggctatggtaatgagtgtacgcatatgccagcctgtaacgagcaataaagtgagtattgttgaacagatcatggcaatggtcatgagtaagaataaattaatattgctatgttgaatatgaatgtaaattgcgattaatatggcaatagaattcaagattaacgataaaatcgattgcagtccgactttgcgaccaaccaataatacagttaataagaacaaaccagtgatgataaccgttaaggtatcacgcttcttttctataatataagcatcactcggcttgttagaaatatgtaataatactttttcgtgtgtgcgaaatgcctcagaatctgcttgcgatttgacgtactgatgattaatcgtcgtcgtttctccagcaaattgaccatttaatattttgacttttaattgatttttatatttaatatcacgattattttgtgcatcttttgtaggtgtcgaagaaacatgtttgacatctataatttgaccaattggtttgttgtaaaagttctcattattgaatgtaaataaaatagcaccaatgaatgcgatgcagaacaaacctaaaattatattaaatggctttgtaaataaatttctatatttcaaaaacaaaaccccaattctatgaatgaattaatatggtgattatacgcccttaattttttattttcaaagatattactgctaagtgtaaaacgaaaatcatcattgatagcatcgaattacttaatggaatgtagacgttttagtcattaattgctgaataagtgttaataatatgccaatatcactctttgtataaggctcctttgtaatagcacatatcgttctttttaattcagtatgatctaattttatatctatccatgatttagattctggtaaatgtatattttgtgatgaaatgatgtaaccttctttttgacgaaggagatactgcgcaagtggttggctactgattgtgtatacatctgatttagtaatcttgcgcaattgtttttttacagtttcggcaaatggtgccaagcaataaatatgactatgctcaaactgaattaatggtgggtgtgtcgccatcgtaattggatcgtctgaaggcgcatataaatgatagtgctcttcgaataaaggtagcatatgtaattgtttgtgtttacgtatttctggtgtaagttccgtgaaaccaatgtctatattcccatttaatacgctatttataattgtgtcatgttctaataagctcggtatgacatgtgtatcattttgtaaatgaaacgtttggataagtggtagtaacatgtgggatacgtcactctcatcatagccaatgtagatacttttatttttagttaatccatggctttgaaattgttcaatcgtgctatctaaatgttcaataatacgcagagcttcattaaataataatttcccttcagatgtgagcgtaatattgcgtccttgctttttaaataaagacacattaagttcttgttctaataatgtaatttgacggcttatcgctgattgagcaatgtttagttcaagtgctgtttcggagatatgttctcttttagcgacctcgataaaatatcttaattgtttaatttccatagcgatataggcacctccaaaaatgagtgttttgtaactattatagcaatattattgataaatgttctattttttagatgaatatcttctattttatatattgaacagataaattttttagattatagtaattatcattaataactaatatcagaatattctaaaaaaggggtgtgcatcatgcacaatgagaaattaattaaaggcttatatgactatcgtgaggaacatgatgcgtgtggtattggtttttatgcgaatatggataataaaaggtctcacgacatcattgataaatcgcttgaaatgttgcgacgcttagatcacaggggcggggtcggcgcagatggcatcactggtgatggcgcaggtattatgactgaaataccttttgcatttttcaaacaacatgtaacggactttgatatcccaggtgaaggtgaatatgccgtggggttatttttttccaaagaacgcattttaggttctgaacatgaagtagtttttaaaaaatattttgaaggcgaagggttatcaattcttggttatcgtaatgtaccagttaataaagatgccattgctaaacatgtagcagatacgatgccagtcattcaacaagtgtttattgatattagggacattgaagatgttgaaaagcgtttgtttttagcgagaaaacaattagagttctattcgactcagtgcgatttagaattgtattttacgagcttatcacgcaaaacaattgtatataaaggttggttacgatcagaccaaattaaaaaactatatacagatttatcggatgatttatatcaatcaaagctagggttagtgcattcgagatttagtacgaatacattcccgagttggaaaagggcacatcctaaccgtatgttaatgcataatggtgagattaacacgattaaaggtaatgtaaactggatgcgagcacgccaacataaattaatcgaaacattatttggcgaggatcaacataaagtgtttcaaattgtcgatgaggatggtagtgactctgccattgtagataatgcgctagagttcttatcgttagccatggagccagaaaaggcagcgatgttactcatacctgaaccttggttatataatgaagcgaatgatgcaaatgtacgtgcgttttatgaattttatagttatttaatggaaccgtgggatggtcctacaatgatttcgttctgtaacggtgacaaacttggcgcgcttacagatagaaatggattacgtccaggtcgttatacgattactaaagataactttattgtcttttcatctgaagtgggtgttgtggacgtacctgaaagtaatgttgcttttaaaggtcaattgaatcctggaaagttattgcttgttgattttaaacagaataaagtcattgaaaataatgatttaaaaggtgcgattgctggagaattaccatataaagcgtggattgataaccataaagttgactttgattttgaaaatatacaatatcaagattcgcaatggaaagatgagacgttatttaaattacaacgtcagtttgcatacacgaaagaagagattcataagtatattcaggaacttgtagaaggtaagaaggatcctatcggtgcaatgggatatgatgcgccaattgcagtgttgaacgagcgaccagaatcactatttaattactttaaacagctgtttgcacaagttacgaatccaccaattgatgcgtatcgtgaaaaaatcgtaacgagtgaactttcttatttaggtggcgaaggtaacttactagcacctgacgaaacggttttagatcgtattcaattgaaaaggccggtattgaatgaatcacacttagcagcgattgatcaggaacattttaaattaacttatttatcaacggtatatgaaggggatttggaagatgcgttagaagcattaggccgagaagcagtgaatgctgtaaagcaaggcgctcaaattctagtgttagatgatagtggattagttgatagcaatggctttgcaatgccgatgttactcgcaataagtcatgtgcatcaattacttattaaagcagatttacgtatgtctacaagtttagtcgctaaatctggtgagacacgagaagtgcatcatgttgcttgtttactcgcatatggcgcgaatgcaattgtgccatacctagcgcaacgtacagttgaacaactgacattgacagaagggttacaaggcaccgttgtcgataatgttaagacatatacggatgtattgtcagaaggtgtcattaaagtaatggctaagatgggaatttcgacagtgcaaagttatcaaggggcacaaatatttgaagcgattggcttgtctcatgatgtgattgatcgttattttactgggacacagtctaagttatctggtatttcgattgatcaaattgatgctgaaaataaagcacgtcaacaaagtgatgataattatcttgcatcaggtagtacattccaatggagacaacaaggtcaacatcatgcttttaatccggaatctattttcttattgcagcacgcatgtaaagaaaatgactatgcgcaatttaaagcatactctgaagcggtgaacaaaaatagaacagatcacattagacatttacttgaatttaaagcatgtacaccgattgacatcgaccaagttgaaccggtaagtgacattgtcaaacgctttaatacaggggcgatgagttatggatcgatttcagcggaagcacatgaaacgttagcacaagccatgaaccaattaggtggaaagagtaatagtggtgaaggtggcgaagatgcaaaacgttatgaagtacaagttgatggaagcaacaaagtaagtgcgattaaacaagttgcttctgggcgttttggtgtaactagtgattatttacaacatgccaaagaaattcaaattaaagttgcgcaaggtgcaaagcctggtgaaggtggtcaattacctggtactaaggtatatccgtggattgcgaagacaagagggtcaacgccaggtatcggtctgatttcaccaccgccacatcatgatatttattcaatagaagatttagcgcaactgatacatgatttgaaaaatgcgaataaagatgcagatatcgcggtaaaattagtttcgaaaacaggtgttggtaccattgcatctggggtggcaaaagcatttgcagataaaattgtcatcagtggttacgatggtggtacaggggcttcacccaaaacgagtattcagcatgccggtgttccttgggagattggtttagcagaaacacatcaaacattaaaactaaatgacttaagaagtcgtgttaagttagaaacagacggtaagttattaactggtaaagatgtagcgtacgcatgtgcgcttggagcggaagaatttggatttgcaactgcaccattagtggtgttgggctgtattatgatgcgtgtatgccataaagatacatgtccagtaggagttgcaactcaaaacaaagatttacgtgctttatatagaggtaaagcacatcatgttgttaattttatgcattttattgcacaagaattaagagaaattttagcatctttaggtttgaaacgtgtagaagacttagttggaagaactgatttattacaacgatcatcaacattaaaagcgaatagcaaagcggctagtattgatgttgaaaaactgttatgtcctttcgatgggccaaacacaaaagaaattcaacaaaatcataatcttgagcatggatttgatttaacaaatttatatgaagtaacgaagccatatattgctgaagggcgtcgctatacaggtagctttacagtaaataatgaacaacgtgatgtaggggttattacaggtagtgagatttcgaaacaatatggagaagcaggacttcctgaaaatacaattaatgtttatacgaatggtcatgctggtcaaagtcttgcagcatatgcaccgaaaggcttaatgattcatcatactggagatgcgaatgactatgttggtaaaggattatctggtggtacggtcattgtcaaagcaccttttgaagaacgacaaaatgaaattattgctggtaacgtctcattctatggtgcgacaagtggtaaggcatttattaacggtagtgcaggagaaagattctgtattagaaatagtggtgtagatgttgtcgttgaaggtatcggcgaccatggattagagtatatgactggtggacatgtcattaatttaggtgatgtaggtaagaacttcggtcaaggtatgagtggtggtattgcttacgttatcccgtctgatgtagaagcttttgttgaaaataatcaactagatacgctttcgtttacaaagattaaacaccaagaagaaaaagcattcattaagcaaatgctggaagaacatgtgtcacacacgaatagtacgagagcgattcatgtgttaaaacattttgatcgcattgaagatgtcgtcgttaaagttattcctaaagattatcaattaatgatgcaaaaaattcatttgcacaaatcattacatgacaatgaagatgaagcgatgttagctgcattttacgatgacagtaaaacaatcgatgctaaacataaaccagccgttgtgtattaaggaaagggggagatacgatgggtgaatttaaaggatttatgaagtatgacaaacagtacttaggtgaattatcactggtagaccgtttgaagcatcataaagcatatcaacaacgatttactaaagaagatgcctctatccaaggtgcacgatgtatggattgtggaacgccgttttgtcaaaccggacaacagtatggtagggaaacaataggttgtccaattggaaactacattcctgaatggaacgacttagtgtatcatcaagattttaaaactgcttatgaacgcttaagcgaaacaaataactttcctgactttacagggcgtgtatgtcctgcaccatgcgaaagtgcttgtgtgatgaagattaatagagaatcgattgcgattaaaggtattgaacgcacaattattgatgaagcttttgaaaatggttgggtagcgccgaaagttccgagtcgccgtagagatgaaaaagtggcaatcgttggaagcggtccagcaggattagctgctgctgaagaacttaatctactaggatatcaagtaactatttatgaacgtgctagagaatcaggcggtttattaatgtatggtattccgaatatgaaacttgataaagatgtggttcgacgtcgtattaagttaatggaagaagcgggcattactttcattaatggtgttgaagtcggtgttgatattgataaagcaacgttagaatctgagtatgatgccattatattatgtactggtgcacaaaaaggtagagatttacctttagaaggacgcatgggtgatggtatacatttcgctatggattatttaactgaacaaacgcagttgttaaatggagaaattgatgatataacaataactgcaaaagataagaatgtcattatcattggtgctggtgatacaggggcagactgtgtagcgacagcattaagagaaaattgtaaatcgattgttcaatttaataaatatacgaaattgccagaagcaattacatttacagaaaatgcatcatggcctttagcaatgccggtgtttaaaatggactatgcgcaccaagagtacgaagctaagtttggtaaggaaccacgtgcatatggtgttcaaacaatgcgttacgatgttgacgataaaggacacatacgtggtttgtatactcaaattttagagcaaggcgaaaatggtatggtcatgaaagaaggacctgaaagattttggcctgctgaccttgtattattatcaatcggcttcgaaggtacagaaccaacagtaccgaatgcttttaacattaaaacggatagaaatcgaatcgtggcggatgatacaaactatcaaactaataatgaaaaggtatttgctgctggagatgctagacgtggtcaaagtttagttgtatgggcaattaaagaaggtagaggcgtagcgaaagcagtagatcagtatttagctagtaaagtttgtgtataatctttgtatggaaatggtggttacgttgacgttgtgacatgctgaatcgagtttgaaaaaatctagtatctatcaacgtcacatgccatctttgtaacctaaaaacaaaggtttgtaagacaacaaatagattaattataagtagtgattttttacattcgtttataggtcaactgtagtggaagacaatgatttgtggtaatcatgtaatgcttaaaaacaatattgacttttacagaacgttcatatatgataaatattgtgtttaggaggaatacccaagtccggctgaagggatcggtcttgaaaaccgacaggggcttaacggctcgcgggggttcgaatccctcttcctccgccatcaatatttatattaaattctatatataatgaaggtaagtgctcaaattttgagtatttaccttttttatttgtctttgaatggctcgtaatttttgataatagaaatgataaggcattgagattggaagggcatttggcttgtgcaatatacatagctaaatgtcttttttgttttgtgaaatatgatggatggcttgtgtggacaagtttgctatttatagatatgcatttttcaatttaggagttggccatgcatctacactttataatggtgagagcgtggtgaggtattgttaataacgcaattgtagcgaggagttattgctacatatgtcgttatggctcattgattttctgaaatggctaccccagataattgtgacaaaataaaaatattttgttgaaagcctttacataacttgtctagacaagttatactcgttttaagacattaagggagtgaaatatatggctgtaaaaagagaagatgtaaaagccatcgtaaccgctattgggggaaaagaaaatcttgaagctgcaacgcattgtgtaacacgattacgtttagtgctgaaggatgaaagtaaagttgataaagacgcattaagtaataacgcgttggtcaaggggcagtttaaagcagaccatcaatatcaaattgtcattggtccaggaacagtcgatgaagtgtataagcagtttattgatgaaacaggtgctcaagaagcttcgaaagatgaagcgaaacaagcagctgcacaaaaagggaatccagtacaacgtttgatcaaattgttgggggatatttttataccaatattacctgcgattgtgacagctggtttgttaatgggaatcaataatttacttacaatgaaaggtttatttggtccaaaagcacttattgagatgtatccacaaattgctgatatttcaaacatcattaatgtgattgcgagtacggcatttattttcttaccagcattaattggttggagtagtatgcgtgtatttggtggtagtccgattctaggcatagtcttaggtttgattttaatgcatccgcaattagtatctcagtatgatttggcaaaagggaatattccgacgtggaacttatttggcttagagattaagcagttgaattaccaaggtcaagtgttgccagttttaattgcagcttacgttctagctaaaattgaaaaaggattaaataaagtcgttcacgattcgataaaaatgttggtcgttggacccgtagcgcttttagttactggatttttagcatttattatcattggaccagttgcgttattgattggtacaggtattacatctggtgttacatttatattccaacatgcaggatggcttggcggagcaatatatggattgttatatgcaccacttgtaattacaggactacaccatatgtttttagcagtagatttccaattgatgggtagcagcttaggcggtacgtatttatggccaattgttgcgatttccaatatttgtcagggctctgcagcatttggagcatggtttgtctataaacgtcgtaaaatggttaaagaagaaggcttggcattaacatcttgtatttctggtatgttaggtgttactgaaccagccatgttcggtgtgaacttacctctgaaatatccatttatcgctgcgatatcaacgtcttgtgtattgggggcaatcgttggtatgaataacgtacttggaaaagttggtgttggtggcgtgccagcattcatttcaattcaaaaagaattttggccagtatatcttattgtgacagctattgctattgttgtaccatgtatactaacaattgtgatgtctcattttagtaaacaaaaagcgaaagaaattgttgaagattaataaaataaaaaaggggcgttcgttatttggacgtcctttattacgttataaggtggtaattgtgtgtcgaaagaaatagattggagaaaatccgttgtatatcaaatttatcctaagtcgtttaatgatacgacggggaatggtataggagatatcaatggaattatagaaaaattggattatatcaagttattgggtgttgattatatttggttaacaccagtgtatgaatcaccgatgaatgataatggctatgatatcagcaattatttagaaatcaatgaagactttggaacgatggatgattttgaaaagttaatcaaagttgcgcatcaaaaagacttgaaagtgatgttagatattgtcattaatcatacgtcgacggagcatgaatggtttaaagaagcccgtaaatctaaagataacccttatagagattattactttttcagatcatctgaagacgggccgccaacaaattggcattctaaattcggtggtaatgcatggaagtatgattctgagacagatgaatattatttacatttatttgatgtcagtcaagctgatttaaattgggataatccggaagtacgtcaatcgttatatcgcatagtcaatcattggatagacttcggcgttgatggttttcgatttgatgtcattaacttaatttctaaaggtgaatttaaggactctgacaaaataggtaaagaattttatacggatggtcctagagtgcatgagtttctgcatgaattaaatcgtcaaacgtttggtaacactgacatgatgactataggagaaatgtcttcgacgacgattgaaaattgtattaagtatacacaaccagaacgccaagaattgaatagtgtttttaattttcatcatctaaaggttgattatgttgatggtgaaaagtggacaaatgcgaagcttgattttcataagttaaaggaaattctgatgcaatggcaacgaggtatttatgacggtggcggatggaacgcgattttctggtgtaatcatgatcagccacgggtagtgtctagatttggtgatgatacgtcggaagagatgaggatacaaagtgctaaaatgttagctatcgcactgcatatgttgcaagggacgccatatatttaccaaggtgaagaaattggtatgacggacccacattttacatcaatagcacaatatcgtgatgttgaatcgattaatgcctaccatcagttgttaagtgaagggcatgctgaagcggatgtgttagcgattttaggacagaagtcacgagacaattcgagaacgcctatgcaatggagtgatgatgttaatgctggatttacagctggtaagccttggattgatatttcggaaaattatcatcaggtcaacgttagacaagcacttcagaataaagagtctattttctatacgtatcaaaaattaatacaattaagacatacgcatgatattattacgtatggagacattgtgccacgttttatggatcatgatcatttatttgtttatgaacgtcattataagaatcaacaatggctagtaattgcgaatttctcagcatcggctgttgatttgccagaaggattggctagagaaggttgtgttgtgattcaaacaggcacagtggaaaataatacgataagcgggtttggtgcaattgtaatcgaaacaaacgcgtaaaataaattgagtggatgcgtttatatggcgaaacaaaaaaagtttatgaagatttatgaggcgttgaaagaagatatattaaacgggcagattcaatatggtgaacaaattccgtctgaacatgatttggtgcaattgtaccagtcatctcgagagaccgtgcgtaaggcattagatttgttggcattagacggcatgattcaaaagattcatggtaaagggtcacttgtcatttatcaggaggttacagagtttccattttctgaacttgttagttttaaagaaatgcaagaagaaatgggcgtcgcatatttaactgaagttgttgtgaatgaggttgttgaagcgcatgaagttccagaagttcaacatgctttaaacatcaattctagtgaatcactcattcatattgttagaactcgtcggcttaaccaacatgtgaagattgttgatgaagattattttctaaagtcgattgtttcagatataggtaatgatgttgcgagtgattctatttatgattatttggaaaaggtattaaatcttaatattagttattcaagtaagtctattacttttgaaccgtttgatgaacaagcatatcaattgtttggtgatgtatcggtggcttattcagcaacagttcgaagtattgtgtatttagaaaatacaatgccgtttcaatataatatttcaaaacatcttgcaaatgaatttaaatttaatgacttctcaagacgtcgtataaagtaaacaatgatataaatgatttatacttgcaattaactattaaaatatagtaatatatatcttgccgtgctaggtggggaggtagcggttccctgtactcgaaatccgctttatgcgaggcttaattcctttgttgaggccgtatttttgcgaagtctgcccaaagcacgtagtgtttgaagatttcggtcctatgcaatatgaacccatgaaccatgtcaggtcctgacggaagcagcattaagtggatcatcatatgtgccgtagggtagccgagatttagctaacgactttggttacgttcgtgaattacgttcgatgcttaggtgcacggttttttattttttaaatattaaaccgattattaagagttgaaaatatataattatagaagctactttcttgaagacaattcagcgtattatacgtggaacatgtttgtgggaagtagcttttttatatgtgaagtttgattcaagtgaactcgatgtgcagtttgaatgatttttgtgtcaatgaaaagtaagaagttataatttgatgataaagaaatgatggtgaaatgagggggagtatcttacaatagaattattaatgagatacgttatgattattgacaatcaaatgcctacggaggacatatgcaaatatatttaagtactttaacagagttagattatgataaatctttaaatagtattgaagaaagttttgatgataatcctgaaacgagttggcaagcacgtgcgaaagtaaaacatttaagaaaatctccttgctataattttgaattagaagtaatagcgaaaaatgaaaataacgatgtcgttggacacgttttattaattgaagtagaaattaatagtgatgataagacgtattatggtttggcgattgcctctttatcagttcatcctgaattacgtggacaaaaattaggtcgtggcttggttcaagcagtagaagagcgtgccaaagcacaagagtatagtacggttgttgtagaccattgttttgactactttgaaaagttgggttatcaaaatgctgctgagcatgacattaaattagaatctggtgatgcaccgttacttgtaaaatatttatgggataatttgacggatgcaccacacggaatcgtaaaatttccagaacatttttattaattgttcaattaagaagtaaaggtattatcatgctataatgagaggtaattgtttatggaggtgctaacttgaattatcaagccttatatcgtatgtacagaccccaaagtttcgaggatgtcgtcggacaagaacatgtcacgaagacattgcgcaatgcgatttcgaaagaaaaacagtcgcatgcttatatttttagtggtccgagaggtacggggaaaacgagtattgccaaagtgtttgctaaagcaatcaactgtctaaatagcactgatggagaaccttgtaatgaatgtcatatttgtaaaggcattacgcaggggactaattcagatgtgatagaaattgatgctgctagtaataatggcgttgatgaaataagaaatattagagacaaagttaaatatgcaccaagtgaatcgaaatataaagtttatattatagatgaggtgcacatgctaacaacaggtgcttttaatgcccttttaaagacgttagaagaacctccagcacacgctatttttatattggcaacgacagaaccacataaaatccctccaacaatcatttctagggcacaacgttttgattttaaagcaattagcctagatcaaattgttgaacgtttaaaatttgtagcagatgcacaacaaattgaatgtgaagatgaagccttggcatttatcgctaaagcgtctgaagggggtatgcgtgatgcattaagtattatggatcaggctattgcatttggtgatggtacgttaacattgcaagatgcgttgaatgtcacaggtagcgtacatgatgaagcgttggatcacttgtttgatgatattgtacaaggtgacgtacaagcatcttttaaaaaataccatcagtttataacagaaggtaaagaagtgaatcgcctaataaatgatatgatttattttgtcagagatacgattatgaataaaacatctgagaaagatactgagtatcgagcactgatgaacttagaattagatatgttatatcaaatgattgatcttattaatgatacattagtgtcgattcgttttagtgtgaatcaaaacgttcattttgaagtgttgttagtaaaattagctgagcagattaagggtcaaccacaagtgattgcgaatgtagctgaaccagcacaaattgcttcatcgccaaacacagatgtattgttgcaacgtatggaacagttagagcaagaactaaaaacactaaaagcacaaggagtgagtgtcgctcctgttcaaaaatcttcgaaaaagcctgcgagaggcatacaaaaatctaaaaatgcattttcaatgcaacaaattgcaaaagtgctagataaagcgaataaggcagatatcaaattgttgaaagatcattggcaagaagtgattgatcatgccaaaaataatgataaaaaatcactcgttagtttattgcaaaattcggaacctgtggcggcaagtgaagatcacgtacttgtgaaatttgaggaagagatccattgtgaaatcgtcaataaagacgacgagaaacgtagtagtatagaaagtgttgtatgtaatatcgttaataaaaacgttaaagttgttggtgtaccatcagatcaatggcaaagagttcgaacggaatatttacaaaatcgtaaaaacgaaggcgatgatatgccaaagcaacaagcacaacaaacagatattgctcaaaaagcaaaagatcttttcggtgaagaaactgtacatgtgatagatgaagagtgatacatgacaagcgatataatcgtatgtataatgaaagaaacatcattttattgataaatatttattgattttcaaggaggaaatggaatatgcgcggtggcggaaacatgcaacaaatgatgaaacaaatgcaaaaaatgcaaaagaaaatggctcaagaacaagaaaaacttaaagaagagcgtattgtaggaacagctggcggtggcatggttgcagttactgtaactggtcataaagaagttgtcgacgttgaaatcaaagaagaagctgtagacccagacgatattgaaatgctacaagacttagtgttagcagctactaatgaagcgatgaataaagctgatgagcttactcaagaacgtttaggtaaacatactcaaggcttaaacatccctggaatgtgatcatagatgcattatccagaacctatatcaaaacttattgatagctttatgaaattgccaggcattggtccaaagacagcccaacgtctggcttttcataccttagatatgaaagaagacgatgttgttcagtttgccaaagcattagtagatgttaagagagaattaacatattgtagcgtatgtggtcacattactgaaaatgatccatgttatatttgtgaagataagcaaagagatcgttcagttatttgtgttgtggaagatgacaaagatgtcatagctatggaaaaaatgagagaatacaaaggtttatatcacgttttacatgggtctatttcgcctatggatggcattggaccagaagatattaatattccttcattgattgaacgcttgaaaaacgatgaagttagcgaattaatcttagctatgaacccgaacttagagggggaatctacagccatgtatatttctagattagttaagcctataggtatcaaagtgacgagattagcacaagggttatcggtaggtggcgatttagagtatgctgacgaagtaacattatctaaagcaatcgcaggtagaacagaaatgtaatgtcttctattaaacatttttgattttaatactatagtaagaaaagtcacagtgtaatcattgtggctttttttatggtgtggtgtgatgtactactttatttgcggtgtggcggtggtatggtttacctagttttactgagggatgggtaatctttaggaagcaagccgttggttgtgatttgttacttctaatagtaatgatgtgaattggattatcgaattagatctatggttatggtgtgttggtgctattaatttgataaatgcggttaatgactatgcaaatgaaattcttttgtaattgaaatgatagatgctggcttagtaagttgtacttctttggtctaaagcttattaaatcagcctgtatagcggtgttttgagagattatttaaaacttgtaaatttatttttaatttctggtaaaaaaataacgttctgttttgcgttttttttgattgatatggttagagaaaaatctgtttcttgttctaaaaaacgtactatttataagtggggattttttaagttcgatttttaggataagggcgttcagtacagatgacaaaggtgtaatttttactgttgttaagcagtttgaaagcctgtatagtatttatttgttgaggcaaacaaaacaactcaacttaagaaataacttgaattactaacgaaaattaattttaaaaagttattgacttaaatgttaataaaatgtataattaattcttgtcggtaagaaaaatgaacattgaaaactgaatgacaatatgtcaacgttaattccaaaaacgtaactataagttacaaacattatttagtatttatgagctaatcaaacatcataatttttatggagagtttgatcctggctcaggatgaacgctggcggcgtgcctaatacatgcaagtcgagcgaacggacgagaagcttgcttctctgatgttagcggcggacgggtgagtaacacgtggataacctacctataagactgggataacttcgggaaaccggagctaataccggataatattttgaaccgcatggttcaaaagtgaaagacggtcttgctgtcacttatagatggatccgcgctgcattagctagttggtaaggtaacggcttaccaaggcaacgatgcatagccgacctgagagggtgatcggccacactggaactgagacacggtccagactcctacgggaggcagcagtagggaatcttccgcaatgggcgaaagcctgacggagcaacgccgcgtgagtgatgaaggtcttcggatcgtaaaactctgttattagggaagaacatatgtgtaagtaactgtgcacatcttgacggtacctaatcagaaagccacggctaactacgtgccagcagccgcggtaatacgtaggtggcaagcgttatccggaattattgggcgtaaagcgcgcgtaggcggttttttaagtctgatgtgaaagcccacggctcaaccgtggagggtcattggaaactggaaaacttgagtgcagaagaggaaagtggaattccatgtgtagcggtgaaatgcgcagagatatggaggaacaccagtggcgaaggcgactttctggtctgtaactgacgctgatgtgcgaaagcgtggggatcaaacaggattagataccctggtagtccacgccgtaaacgatgagtgctaagtgttagggggtttccgccccttagtgctgcagctaacgcattaagcactccgcctggggagtacgaccgcaaggttgaaactcaaaggaattgacggggacccgcacaagcggtggagcatgtggtttaattcgaagcaacgcgaagaaccttaccaaatcttgacatcctttgacaactctagagatagagccttccccttcgggggacaaagtgacaggtggtgcatggttgtcgtcagctcgtgtcgtgagatgttgggttaagtcccgcaacgagcgcaacccttaagcttagttgccatcattaagttgggcactctaagttgactgccggtgacaaaccggaggaaggtggggatgacgtcaaatcatcatgccccttatgatttgggctacacacgtgctacaatggacaatacaaagggcagcgaaaccgcgaggtcaagcaaatcccataaagttgttctcagttcggattgtagtctgcaactcgactacatgaagctggaatcgctagtaatcgtagatcagcatgctacggtgaatacgttcccgggtcttgtacacaccgcccgtcacaccacgagagtttgtaacacccgaagccggtggagtaaccttttaggagctagccgtcgaaggtgggacaaatgattggggtgaagtcgtaacaaggtagccgtatcggaaggtgcggctggatcacctcctttctaaggatatattcggaacatcttcttcagaagatgcggaataacgtgacatattgtattcagttttgaatgtttatttaacattcaaatattttttggttaaagtgatattgcttatgaaaataaagcagtatgcgagcgcttgactaaaaagaaattgtacattgaaaactagataagtaagtaaaatatagattttaccaagcaaaaccgagtgaataaagagttttaaataagcttgaattcataagaaataatcgctagtgttcgaaagaacactcacaagattaataacgcgtttaaatctttttataaaagaacgtaacttcatgttaacgtttgacttataaaaatggtggaaacatagattaagttattaagggcgcacggtggatgccttggcactagaagccaatgaaggacgttactaacgacgatatgctttggggagctgtaagtaagctttgatccagagatttccgaatggggaaacccagcatgagttatgtcatgttatcgatatgtgaatacatagcatatcagaaggcacacccggagaactgaaacatcttagtacccggaggaagagaaagaaaattcgattcccttagtagcggcgagcgaaacgggaagagcccaaaccaacaagcttgcttgttggggttgtaggacactctatacggagttacaaaggacgacattagacgaatcatctggaaagatgaatcaaagaaggtaataatcctgtagtcgaaaatgttgtctctcttgagtggatcctgagtacgacggagcacgtgaaattccgtcggaatctgggaggaccatctcctaaggctaaatactctctagtgaccgatagtgaaccagtaccgtgagggaaaggtgaaaagcaccccggaaggggagtgaaatagaacctgaaaccgtgtgcttacaagtagtcagagcccgttaatgggtgatggcgtgccttttgtagaatgaaccggcgagttacgatttgatgcaaggttaagcagtaaatgtggagccgtagcgaaagcgagtctgaatagggcgtttagtatttggtcgtagacccgaaaccaggtgatctacccttggtcaggttgaagttcaggtaacactgaatggaggaccgaaccgacttacgttgaaaagtgagcggatgaactgagggtagcggagaaattccaatcgaacctggagatagctggttctctccgaaatagctttagggctagcctcaagtgatgattattggaggtagagcactgtttggacgaggggcccctctcgggttaccgaattcagacaaactccgaatgccaattaatttaacttgggagtcagaacatgggtgataaggtccgtgttcgaaagggaaacagcccagaccaccagctaaggtcccaaaatatatgttaagtggaaaaggatgtggcgttgcccagacaactaggatgttggcttagaagcagccatcatttaaagagtgcgtaatagctcactagtcgagtgacactgcgccgaaaatgtaccggggctaaacatattaccgaagctgtggattgtcctttggacaatggtaggagagcgttctaagggcgttgaagcatgatcgtaaggacatgtggagcgcttagaagtgagaatgccggtgtgagtagcgaaagacgggtgagaatcccgtccaccgattgactaaggtttccagaggaaggctcgtccgctctgggttagtcgggtcctaagctgaggccgacaggcgtaggcgatggataacaggttgatattcctgtaccacctataatcgttttaatcgatggggggacgcagtaggataggcgaagcgtgcgattggattgcacgtctaagcagtaaggctgagtattaggcaaatccggtactcgttaaggctgagctgtgatggggagaagacattgagtcttcgagtcgttgatttcacactgccgagaaaagcctctagatagaaaataggtgcccgtaccgcaaaccgacacaggtagtcaagatgagaattctaaggtgagcgagcgaactctcgttaaggaactcggcaaaatgaccccgtaacttcgggagaaggggtgctctttagggttaacgcccagaagagccgcagtgaataggcccaagcgactgtttatcaaaaacacaggtctctgctaaaccgtaaggtgatgtataggggctgacgcctgcccggtgctggaaggttaagaggagtggttagcttctgcgaagctacgaatcgaagccccagtaaacggcggccgtaactataacggtcctaaggtagcgaaattccttgtcgggtaagttccgacccgcacgaaaggcgtaacgatttgggcactgtctcaacgagagactcggtgaaatcatagtacctgtgaagatgcaggttacccgcgacaggacggaaagaccccgtggagctttactgtagcctgatattgaaattcggcacagcttgtacaggataggtaggagcctttgaaacgtgagcgctagcttacgtggaggcgctggtgggatactaccctagctgtgttggctttctaacccgcaccacttatcgtggtgggagacagtgtcaagcgggcagtttgactggggcggtcgcctcctaaaaggtaacggaggcgctcaaaggttccctcagaatggttggaaatcattcatagagtgtaaaggcataagggagcttgactgcgagacctacaagtcgagcagggtcgaaagacggacttagtgatccggtggttccgcatggaagggccatcgctcaacggataaaagctaccccggggataacaggcttatctcccccaagagttcacatcgacggggaggtttggcacctcgatgtcggctcatcgcatcctggggctgtagtcggtcccaagggttgggctgttcgcccattaaagcggtacgcgagctgggttcagaacgtcgtgagacagttcggtccctatccgtcgtgggcgtaggaaatttgagaggagctgtccttagtacgagaggaccgggatggacatacctctggtgtaccagttgtcgtgccaacggcatagctgggtagctatgtgtggacgggataagtgctgaaagcatctaagcatgaagcccccctcaagatgagatttcccaacttcggttataagatccctcaaagatgatgaggttaataggttcgaggtggaagcatggtgacatgtggagctgacgaatactaatcgatcgaagacttaatcaaaataaatgttttgcgaagcaaaatcacttttacttactatctagttttgaatgtataatctacattcatatgtctggtgactatagcaaggaggtcacacctgttcccatgccgaacacagaagttaaggtctttagcgacgatggtagtcgacttacgttccgctagagtagaacgttgccaggcaaaaaatggatgcgatgagccgcattgagaccgcaaggtctcttttttttatgcctaaaacgtcaaaataaaaagtaaacacaaagaaaaatggcttggcgaagtgaaaacgtttgaatctgacgaaacgagaaaagagcgcaacgagtttagtagagctaaatgagtaagcgagagccgaaggagaggaaagaagcaagcgattgtcacaagtcaagaaaggtctttagcgacgatggtagccaacttacgttccgctagagtagaacgttgccaggcaagttgagaccgtgaggtctctttttttatgtctaaaacgtcaaaataaaaagtaaacacaaagaaaaatggcttggcgaagtgaaaacgtttgaatctgacgaaacgagaaaagagcgcaacgagtttagtagagctaaatgagtaagcgagagccgaaggagaggaaagaagcaagcgattgtcacaagtcaagaaaggttcttagcgaggatggtagctaacttacgttccgctagagtagaacgttgctagacaagaaatgaatgcgatgagccgcattgagtgtgaaattgatattttaataatgtgcacttttgattatttaaatctgtgactagaagtataagtgaagacattcagaagtattataaaaagtgaacagcagtaagatagtttttaatcataaatcatcttactgctgtttttagattttatgtctaatatcttttaaatcgaagtacaaaaaggaaattaattattatacaatagacaagctattgcataagtaacactaacttttgtcaaagaagtgttactatataattaatacttttgaaagtaactaattccaaaacagtgtaaataaaggaagcgtatatcatgaagcaacctattttaaataaattagaaagtttaaatcaagaagaagcgatttctttgcatgttccgggtcataaaaatatgactatcggtcatttatctcaattatcaatgacaatggataaaactgaaatacctggattagatgatttacatcatcctgaagaagtcattttggaaagtatgaagcaggtggagaaacattcagattatgatgcttatttcttagtgaatggcaccacttcaggaatattatctgtcatccagtctttttcacagaaaaaaggcgatatcttaatggcaagaaatgtacataaatctgtgttacatgcgctcgatattagccaacaagaagggcattttattgaaacgcatcaaagtccgttaacgaatcattataataaagttaatttaagccgtttgaataatgacggtcacaaacttgctgtgttgacttatcctaactattacggtgaaacatttaatgtagaagaggttatcaaatctttgcaccaattaaatattcctgtactcattgacgaagcacacggcgcgcactttggattgcaaggatttccagattctacattaaattatcaagctgactatgttgttcaatcttttcataaaacgttaccagctttaacgatgggctcggtactttatattcataaaaatgcaccttatagagaaactattatagaatatctaagctacttccaaacatctagtccttcgtatttgattatggctagtttagagtcagctgccgagttctataaaacatatgatagtaccgtgttttttgataagagagcgcaattaatcgaatgtttggagaagaagggttttgaaatgcttcaagttgatgatccgttgaagttgctgataaaatatgaaggttttacaggtcatgatattcaaaattggtttatgaatgcacatatctatttagaattagcggacgactatcaagcattagcgatattgccgttatggcatcatgatgatacgtatttatttgattcgcttttacgtaaaattgaagatatgattttaccgaaaaaatcagtttctaaagttaaacaaacacaacttttaacaactgaaggtaactataaaccaaaacgctttgaatatgttacttggtgtgatttgaaaaaggcaaaaggtaaagttctggcgcgacatattgtcccgtatccgccagggattcctattattttcaaaggagaaacaataactgaaaatatgatagaattggtaaatgaatatctggaaactggaatgatagttgaaggaattaaaaataataaaattttagttgaggatgaataaaatgtcagcttttataacttttgagggcccagaaggctctggaaaaacaactgtaattaatgaagtttaccatagattagtaaaagattatgatgtcattatgactagagaaccaggtggtgttcctactggtgaagaaatacgtaaaattgtattagaaggcaatgatatggacattagaactgaagcaatgttatttgctgcatctagaagagaacatcttgtattaaaggtcataccagctttaaaagaaggtaaggttgtgttgtgtgatcgctatatcgatagttcattagcttatcaaggttatgctagagggattggcgttgaagaagtaagagcattaaacgaatttgcaataaatggattatatccagacttgacgatttatttaaatgttagtgctgaagtaggtcgcgaacgtattattaaaaattcaagagatcaaaatagattagatcaagaagatttaaagtttcacgaaaaagtaattgaaggttaccaagaaatcattcataatgaatcacaacggttcaaaagcgttaatgcagatcaacctcttgaaaatgttgttgaagacacgtatcaaactatcatcaaatatttagaaaagatatgatataattgttagaagaggtgttataaaatgaaaatgattatagcgatcgtacaagatcaagatagtcaggaacttgcagatcaacttgttaaaaataactttagagcaacaaaattggcaacaacaggtgggtttttaagagcgggtaatacaacattcttatgtggtgtcaatgatgaccgtgtagatgaaatattgtctgtgattaatcaaacgtgtggtaatagagaacagttggtttcacctattacacctatgggaggcagtgcggattcgtacattccatatccagttgaagttgaagttggcggtgctactgtatttgttatgccagttgatgcattccatcaattttaattctataatacaatcatcaattagagatacttaaaatagtgtattaataagttattaacaattttgggttgcttgactgcgactagttcagatgccaatagatttgatttttgtggttctaaaaataatcacaaatcatggtcgctattgttgcagtaattagttgctctttggcaacctttttatataaaagcaaaagggagtttgtaatgaatggatgaacagcaacaattgacgaatgcatatcattcaaataaattatcgcatgcctatttatttgaaggtgatgatgcacaaacgatgaaacaagttgcgattaattttgcaaagcttattttatgtcaaacagatagtcaatgtgaaacaaaggttagtacatataatcatccagactttatgtatatatcaacaactgagaatgcaattaagaaagaacaagttgaacaacttgtgcgtcatatgaatcaacttcctatagaaagcacaaataaagtgtacatcattgaagactttgaaaagttaactgttcaaggggaaaacagtatcttgaaatttcttgaagaaccaccggacaatacgattgctattttattgtctacaaaacctgagcaaattttagacacaatccattcaaggtgtcagcatgtatatttcaagcctattgataaagaaaagtttataaatagattagttgaacaaaacatgtctaagccagtagctgaaatgattagtacttatactacgcaaatagataatgcaatggctttaaatgaagaatttgatttattagcattaaggaaatcagttatacgttggtgtgaattgttgcttactaataagccaatggcacttataggtattattgatttattgaaacaggctaaaaataaaaaactgcaatctttaactattgcagctgtgaatggtttcttcgaagatatcatacatacaaaggtaaatgtagaggataaacaaatatatagtgatttaaaaaatgatattgatcaatatgcgcaaaagttgtcgtttaatcaattaattttgatgtttgatcaactgacggaagcacataagaaattgaatcaaaatgtaaatccaacgcttgtatttgaacaaatcgtaattaagggtgtgagttagatgccaaatgtaataggtgttcagtttcaaaaagcgggaaaattagaatattatacacctaatgatatacaagtagatatagaagactgggtagttgtcgaatctaaaagaggcatagagataggtattgttaaaaatccattaatggatattgctgaagaggatgttgtgttacctcttaaaaatattattcgcattgctgatgacaaagatattgataaatttaattgtaatgaacgagatgctgaaaatgcattaatactatgtaaagacattgtaagagaacaaggtttggacatgcgtttagtcaattgcgaatatacattagataaatcgaaagttatttttaattttacggcggatgatcgtattgattttagaaaattagtaaaaatattagcgcaacatttaaaaacacgtatcgagttgagacaaattggtgtaagggatgaagccaaattgcttggcggtatcggaccttgtggtaggtcgttatgttgttctacatttttaggggattttgaaccagtatcgattaagatggctaaggatcaaaatttatcattaaatccaactaaaatttctggtgcatgtggtcgtttgatgtgttgtttaaaatatgaaaatgactattatgaggaagtacgtgcacaattacctgatattggtgaagcaattgaaacgcctgatggtaacgggaaagtagttgctttaaatatattagacatttctatgcaggtgaagcttgagggacatgaacagccacttgaatataaattagaagaaatagaaactatgcattaaggaggcattattacatttggatcgcaatgaaatatttgaaaaaataatgcgtttagaaatgaatgtcaatcaactttcaaaggaaacttcagaattaaaggcacttgcagttgaattagtagaagaaaatgtagcgcttcaacttgaaaatgataatttgaaaaaggtgttgggcaatgatgaaccaactactattgatactgcgaattcaaaaccagcaaaagctgtgaaaaagccattaccaagtaaagataatttggctatattgtatggagaaggatttcatatttgtaaaggcgaattatttggaaaacatcgacatggtgaagattgtctgttctgtttagaagttttaagtgattaatcaagcacactcaaatagtgttataattataaatgaatatggtttggataagtctgagacaatgcatgtttcaggctttaattgtgtataaagttttggtgattgcataagagatggcggtactaaatgttattattaagtgtgcacgcagtatcattagttataaaatgtagctgttaaaagtcaaaaatacatcgaatgtagttaggcatataatataaaaagagttttcaattactcaatagaaaaaggttgtcttcataggagttaaaaatgttaaaagagaatgaacgatttgatcaactaatcaaagaagattttagtattattcaaaatgatgatgttttttcattttcaacggatgctttgttgttagggcattttacaaaacctagaacaaaagatattgtgttggacttatgttcaggcaatggggtgatacccttgttattgtttgcgaaacatccacgacatatagaaggtgttgagattcaaaaaacacttgtcgatatggcgcgacgcacatttcaattcaatgatgttgatgaatatttaacaatgcatcacatggatttgaaaaacgttactaaagtatttaaaccttcacaatatactttagtaacgtgtaatccgccttattttaaagagaatcagcaacaccaacatcaaaaagaagcacataagatagcgagacatgagattatgtgtacacttgaagattgcatgattgcagcccgtcatttattaaaagaaggtggcaggctaaacatggtacatcgtgcagagagactaatggatgtcttgtttgaaatgagaaaagtgaatattgaacctaagaaagtcgtttttatatatagtaaagtagggaaatcagcacaaacgatagtagtagaaggtcgaaaaggtggaaatcaaggtttagaaatcatgcccccattttatatttataatgaagatggtaattatagcgaagaaatgaaggaagtatattatggatagtcattttgtatatattgtaaaatgtagtgatggaagtttatatacaggatacgctaaagacgttaatgcacgtgttgaaaaacataaccgaggtcaaggagccaaatatacgaaagtaagacgtccggtgcatttagtttatcaagaaatgtatgagacaaagtctgaagcattgaagcgtgaatatgaaattaaaacttataccagacaaaagaaattgcgattaattaaggagcgatagtatggctgtattatatttagtgggcacaccaattggtaatttagcagatattacttatagagcagttgatgtattgaaacgtgttgatatgattgcttgtgaagacactagagtaactagtaaactgtgtaatcattatgatattccaactccattaaagtcatatcacgaacataacaaggataagcagactgcttttatcattgaacagttagaattaggtcttgacgttgcgctcgtatctgatgctggattgcccttaattagtgatcctggatacgaattagtagtggcagccagagaagctaatattaaagtagagactgtgcctggacctaatgctgggctgacggctttgatggctagtggattaccttcatatgtatatacatttttaggatttttgccacgaaaagagaaagaaaaaagtgctgtattagagcaacgtatgcatgaaaatagcacattaattatatacgaatcaccgcatcgtgtgacagatacattaaaaacaattgcaaagatagatgcaacacgacaagtatcactagggcgtgaattaactaagaagttcgaacaaattgtaactgatgatgtaacacaattacaagcattgattcagcaaggcgatgtaccattgaaaggcgaattcgttatcttaattgaaggtgctaaagcgaacaatgagatatcgtggtttgatgatttatctatcaatgagcatgttgatcattatattcaaacttcacagatgaaaccaaaacaagctattaaaaaagttgctgaagaacgacaacttaaaacgaatgaagtatataatatttatcatcaaataagttaatcactttatcgattatatgaaattttaaacgattttataaacgcaagctgtaattttaaatggtaagttatcattttgcattgatactgataaaatgatgttgactatgataaaaaaatgatgacatcgacgttttttaatgtaaaataaatacattgaaagtaataaataccttaacattgaataagatgaaaatgagatgacgagataaatgttcgcgtccgttgaaatgcatagaaatcttagatattatttgaagtgagacattacgaggaggaacagttatggctaaagaaacattttatataacaaccccaatatactatcctagtgggaatttacatataggacatgcatattctacagtggctggagatgttattgcaagatataagagaatgcaaggatatgatgttcgctatttgactggaacggatgaacacggtcaaaaaattcaagaaaaagctcaaaaagctggtaagacagaaattgaatatttggatgagatgattgctggaattaaacaattgtgggctaagcttgaaatttcaaatgatgattttatcagaacaactgaagaacgtcataaacatgtcgttgagcaagtgtttgaacgtttattaaagcaaggtgatatctatttaggtgaatatgaaggttggtattctgttccggatgaaacatactatacagagtcacaattagtagacccacaatacgaaaacggtaaaattattggtggcaaaagtccagattctggacacgaagttgaactagttaaagaagaaagttatttctttaatattagtaaatatacagaccgtttattagagttctatgaccaaaatccagattttatacaaccaccatcaagaaaaaatgaaatgattaacaacttcattaaaccaggacttgctgatttagctgtttctcgtacatcatttaactggggtgtccatgttccgtctaatccaaaacatgttgtttatgtttggattgatgcgttagttaactatatttcagcattaggctatttatcagatgatgagtcactatttaacaaatactggccagcagatattcatttaatggctaaggaaattgtgcgattccactcaattatttggcctattttattgatggcattagacttaccgttacctaaaaaagtctttgcacatggttggattttgatgaaagatggaaaaatgagtaaatctaaaggtaatgtcgtagaccctaatattttaattgatcgctatggtttagatgctacacgttattatctaatgcgtgaattaccatttggttcagatggcgtatttacacctgaagcatttgttgagcgtacaaatttcgatctagcaaatgacttaggtaacttagtaaaccgtacgatttctatggttaataagtactttgatggcgaattaccagcgtatcaaggtccacttcatgaattagatgaagaaatggaagctatggctttagaaacagtgaaaagctacactgaaagcatggaaagtttgcaattttctgtggcattatctacggtatggaagtttattagtagaacgaataagtatattgacgaaacaacgccttgggtattagctaaggacgatagccaaaaagatatgttaggcaatgtaatggctcacttagttgaaaatattcgttatgcagctgtattattacgtccattcttaacacatgcgccgaaagagatttttgaacaattgaacattaacaatcctcaatttatggaatttagtagtttagagcaatatggtgtgcttaatgagtcaattatggttactgggcaacctaaacctattttcccaagattggatagcgaagcggaaattgcatatatcaaagaatcaatgcaaccgcctgctactaaagaggaaaaagaagagattcctagcaaacctcaaattgatattaaagactttgataaagttgaaattaaggcagcaacgattattgatgctgaacatgttaagaagtcagataagcttttaaaaattcaagtagacttagattctgaacaaagacaaattgtatcaggaattgccaaattctatacaccagatgatattattggtaaaaaagtagcagttgttactaacctgaaaccagctaaattaatgggacaaaaatctgaaggtatgatattatctgctgaaaaagatggtgtattaaccttagtaagtttaccaagtgcaattccaaatggtgcagtgattaaataactgtatttttaaaaattaggagagataattatgttaatcgatacacatgtccatttaaatgatgagcaatacgatgatgatttgagtgaagtgattacacgtgctagagaagcaggtgttgatcgtatgtttgtagttggttttaacaaatcgacaattgaacgcgcgatgaaattaatcgatgagtatgattttttatatggcattatcggttggcatccagttgacgcaattgattttacagaagaacacttggaatggattgaatctttagctcagcatccaaaagtgattggtattggtgaaatgggattagattatcactgggataaatctcctgcagatgttcaaaaggaagtttttagaaagcaaattgctttagctaagcgtttgaagttaccaattatcattcataaccgtgaagcaactcaagactgtatcgatatcttattggaggagcatgctgaagaggtaggcgggattatgcatagctttagtggttctccagaaattgcagatattgtaactaataagctgaatttttatatttcattaggtggacctgtgacatttaaaaatgctaaacagcctaaagaagttgctaagcatgtgtcaatggagcgtttgctagttgaaaccgatgcaccgtatctttcgccacatccgtatagagggaagcgaaatgaaccggcgagagtaactttagtagctgaacaaattgctgaattaaaaggcttatcttatgaagaagtgtgcgaacaaacaactaaaaatgcagagaaattgtttaatttaaattcataaagttaaaagtgagaaagatcaccgccataaatgtaaacgatgctatattcgtttaatatgctatggttctttctcacttttttaaattaaaatatcgtgcatgtggaatacgtgcgatagagatggttagagctttgaaattaagaattgtaggaaggcgttttaaatgaaaatcaatgagtttatagttgtagaaggacgagatgatactgagcgtgttaaacgagctgttgaatgtgatacgattgaaacgaatggtagtgccatcaacgaacaaactttagaagtaattagaaatgctcaacaaagtcgaggcgttattgtattaacagatccagatttcccaggagataaaattagaagtacaattactgaacatgtcaaaggtgttaaacatgcgtatattgatagagaaaaagctaaaaataaaaaagggaaaattggtgttgaacatgccgacttaattgatattaaagaagcgttaatgcatgttagttcaccctttgatgaagcttatgaatcaattgataaatctgtgctaatagagttggggttaattgttgggaaagatgcaaggcgccgtagagaaattttaagtagaaaattgcgaatcggccattccaatggtaagcagttattgaaaaagttaaatgcatttggttataccgaagcggatgtaaggcaagctttagaagatgaatgaggaagtgaaaatgttggataataaagatattgcaacaccatcaagaacgcgagcgttgttagataaatatggctttaattttaaaaaaagtttaggacagaactttttgatagatgtgaatatcattaataatatcattgatgcaagtgatattgatgcacaaactggggtgattgaaattggtccaggcatggggtcattgacagaacaattggccagacatgctaaaagagtattggcatttgaaattgatcaacgtttaatacctgtattaaatgatacactatcaccttatgataatgtgacggtgattaatgaagatattttaaaagcgaatattaaagaagctgttgaaaatcatttacaagattgtgaaaaaataatggttgttgcaaacctgccgtactatattacgacgccaattttattaaatttgatgcaacaagatataccaattgatggctacgtggtgatgatgcaaaaagaagtgggcgaacgcttaaatgctgaagtaggttcaaaagcatatggttcgttatcaattgtcgtacaatactatacagagactagtaaagtattaacggtacctaaatctgtatttatgccaccacctaatgttgattcaatagttgtaaaactgatgcagagaactgaaccgttagtaacagtagataacgaggaagcattctttaagttagcaaaagcagcatttgcacaaagaagaaagacaattaacaataactatcaaaattattttaaagatggtaaacaacacaaagaagtgattttacaatggttggaacaagcaggtattgatccaagacgtcgcggtgaaacgctatctattcaagattttgctaaattgtatgaagaaaagaaaaaattccctcaattagaaaattaaatgattgacaaagcaaagcactattgttaaaatttaaattttgtttgacgaaaacgttgcaaatatggtattatgtaacttgtagcgaggtggagcaatatgccaaaatcaattttggacatcaaaaattctattgattgtcatgtaggaaatcgtattgtactgaaagccaatggaggccgtaagaaaacaataaaacgttctggaattttaaaagaaacatatccgtcagttttcattgttgagttagatcaagacaaacacaactttgagagagtatcttatacatacactgatgtgttaactgaaaatgttcaagtttcatttgaagaggataatcatcacgaatcaattgcacactaaataagacatatagagatgttagacgtttcttagtataagaagtaaatattatgataattatttgagtgttgggcattatgttcaatactctttttatttacaaaatgtttaacactgatgtttcgcttatagatttttcagtaaatggataattgtatttataaacacaaatacaagtaaatactaagtaattagatggagaaaattacttttttattaaaaaaacactaaaaaacaaattaaaatgtcaaatattaattctctttatgttaaaatcatcatattaagataacgaaaagagggcggaaaatgatatatgaaacggcaccagccaaaattaattttacgctcgatacactttttaaaagaaatgatggctatcatgagattgaaatgataatgacaacagttgatttaaatgatcgtttaacttttcataaaagaaaagatcgaaagatagttgttgagattgaacataattatgtgccttctaatcataaaaatctcgcatatcgtgcagcgcaactatttattgagcaatatcaactaaagcaaggtgtaacaatttctatcgataaagaaatacctgtttctgctggcttagctggaggttcggctgatgcagcagcaacgttaagaggattgaatcgactttttgatataggggcgagtttggaagaattggctctactaggcagtaaaatcgggacagatattccgttttgtatttataataaaactgcactatgtactggaagaggagagaaaatcgagtttttaaataaaccaccttcagcttgggtgattcttgctaaaccaaacttaggcatatcatcaccagatatatttaagttgattaatttagataagcgttacgacgtacatacgaaaatgtgttatgaggccttagaaaatcgagattatcaacaattatgtcaaagtttgtctaatcgattagagccaatttctgtttcaaaacacccacaaatcgataaattaaaaaataatatgttgaaaagtggtgcagatggtgcgttaatgagtggaagcggacctactgtgtatgggctagcacgaaaagaaagccaagcaaaaaatatttataatgcagttaacggttgttgtaatgaagtgtacttagttagactattaggatagaagggttgaaaagatgagatataaacgaagcgagagaattgtttttatgacgcaatatttgatgaaccatccgaataaattgattccattaactttttttgtgaaaaaatttaaacaggcgaagtcttcaataagtgaagatgtccaaattataaaaaatacattccaaaaagaaaagttaggtacagtaattactactgctggcgcaagtggtggtgttacgtataaaccaatgatgagtaaagaagaggcgactgaagttgttaatgaggtcattactctattagaagagaaagaacgtttgttacctggcggatatttatttttatcagatttggtaggtaatccatcgctactaaacaaagttggtaagttaattgccagtatttacatggaagaaaaattagatgctgttgttaccattgcgacaaaaggtatttcattggcaaatgcggttgctaatattttaaatttaccagtagtagtgattagaaaagacaacaaggtgactgaaggttctacagtttcaattaattacgtttcaggatcttcaagaaaaatagaaacaatggtactttcgaagagaactttagcagaaaattcaaatgttttagttgtcgatgattttatgagggctggtggctctattaatggtgttatgaatttaatgaatgagtttaaagcccatgtaaaaggggtatcagtacttgtagaatcaaaagaagttaaacaaagattgattgaagattatacttccttagtgaaattatctgatgtagatgaatataatcaagagtttaacgtagaacctggcaacagtttatctaagttttcataaaaggagttttagtattatgaaaatcattaacacaacaagattaccggaagcacttggaccatattcgcatgcaacagttgtgaatggtatggtttatacttctggtcagattccattgaatattgatggacatatcgtaagcgctgatgttcaagcacagacaaaacaagttttagaaaatttaaaggttgttttggaagaagcaggatctgatttgaattctgttgcgaaagcgaccattttcattaaagatatgaatgatttccaaaaaataaatgaagtgtatggtcaatattttaatgaacacaagccagcgcgtagttgtgtagaggttgcgcgtttgccaaaagatgtgaaagtagaaattgaattagtaagtaaaattaaggaattataattttcgattaatatgtttaatcaagcttctaaataaaacagagagatatatactataggggggctcactacatgaaagtgacagatgtaagacttagaaaaatacaaacagatggacgaatgaaagcactcgtttccattacattagatgaagctttcgtaattcatgatttacgtgtaattgaaggaaactctggcttgttcgttgcaatgccaagtaaacgtacaccagatggtgaattccgcgacatcgcgcatcctattaattcagatatgagacaagaaattcaagatgcagtgatgaaagtatatgatgaaacagatgaagtagtaccagataaaaacgctacatcagaagattcagaagaagcttaatcaattttatatttagcgatgtaatacatttgcaataagttgatttgatactgtcgataaagcataaagctttgtcggcagtttttttagtttgtattaatgtttttttatttttaatgaaaggctaataaatatatacgttaacagattatgatgatatgaaaattattgattcattgctgataaaaattgcgtttgaatgatgctcgtatttttgaagtaagaaaaaagttgtttttaaaattacaacgaattaaaaacaatgccttttatatgttgaaagagtattgcagattaaattataataatgacgaagtgtaaaatttaatgggggttaatgttcatgcgaagacacgcgataattttggcagcaggtaaaggcacaagaatgaaatctaaaaagtataaagtgctacacgaggttgctgggaaacctatggtcgaacatgtattggaaagtgtgaaaggctctggtgtcgatcaagttgtaaccatcgtaggacatggtgctgaaagtgtaaaaggacatttaggcgagcgttctttatacagttttcaagaggaacaactcggtactgcgcatgcagtgcaaatggcgaaatcacacttagaagacaaggaaggtacgacaatcgttgtatgtggtgacacaccgctcatcacaaaggaaacattagtaacattgattgcgcatcacgaggatgctaatgctcaagcaactgtattatctgcatcgattcaacaaccatatggatacggaagaatcgttcgaaatgcgtcaggtcgtttagaacgcatagttgaagagaaagatgcaacgcaagctgaaaaggatattaatgaaattagttcaggtatttttgcgtttaataataaaacgttgtttgaaaaattaacacaagtgaaaaatgataatgcgcaaggtgaatattacctccctgatgtattgtcgttaattttaaatgatggcggcatcgtagaagtctatcgtaccaatgatgttgaagaaatcatgggtgtaaatgatcgtgtaatgcttagtcaggctgagaaggcgatgcaacgtcgtacgaatcattatcacatgctaaatggtgtgacaatcatcgatcctgacagcacttatattggtccagacgttacaattggtagtgatacagtcattgaaccaggcgtacgaattaatggtcgtacagaaattggcgaagatgttgttattggtcagtactctgaaattaacaatagtacgattgaaaatggtgcatgtattcaacagtctgttgttaatgatgctagcgtaggagcgaatactaaggtcggaccgtttgcgcaattgagaccaggcgcgcaattaggtgcagatgttaaggttggaaattttgtagaaattaaaaaagcagatcttaaagatggtgccaaggtttcacatttaagttatattggcgatgctgtaattggcgaacgtactaatattggttgcggaacgattacagttaactatgatggtgaaaataaatttaaaactatcgtcggcaaagattcatttgtaggttgcaatgttaatttagtagcacctgtaacaattggtgatgatgtattggtggcagctggttccacaatcacagatgacgtaccaaatgacagtttagctgtggcaagagcaagacaaacaacaaaagaaggatataggaaataatcatttacgtatttaaaatggctaggataaaaggataatcctatgtaatattaatgtaatctttatgatttaatgattcgcatagtaatggagttacattttatatataatagtaattgcgtaagtaaataattggaggactataaatgttaaataatgaatataagaattcgtcattaaagattttttcattgaaaggaaacgaagcattagcgcaagaagttgctgaccaagtaggaattgaactaggtaaatgttcagttaaacgttttagtgatggagaaattcaaattaatatcgaagagagtattcgtggttgtgacgtatttattattcaaccaacatcatatcctgtgaatctacatttaatggaattattaattatgattgatgcttgtaaacgtgcttctgcagcaacaatcaatattgtagtgccatattatggatatgcaagacaagatagaaaagcccgtagccgtgagccaatcactgctaaattagttgcaaacttaatcgaaacagctggcgcaactcgtatgattgcgttagacttacatgcaccacaaattcaaggattctttgatattccaattgaccacttaatgggtgtgccaattcttgctaaacatttcaaagatgatccgaatattaacccagaagaatgtgtcgttgtttcaccagaccatggcggcgttacacgtgcacgtaaattagctgacattttaaaaactccaattgcaattatagataaacgtcgtcctagaccaaatgttgctgaagtgatgaacattgttggtgagattgaaggacgtacggcaattattattgacgatattattgatacagcaggtacaatcactttagctgcacaagcattaaaagataaaggtgctaaagaagtatatgcttgttgtacacaccctgttttatcaggaccggctaaagaacgtatcgaaaattctgctataaaagaattaatcgtaacaaactcaattcatttagatgaagatcgcaaaccatctaacactaaagaattatctgttgctggtttaatcgcacaagctatcattcgtgtatacgaaagagaatcagttagcgtattatttgactaatatttaaaaggcgtttgacgaacatattccaaacgtgtataatagtttcgttcgtgattatacgaataaataaacacttgcaagcaacgatgatgttgatgggtaagtgaggtgctcgttttgagcaaaaatgaaaggtggaaatgagaatggcttcattaaagtcaatcatccgtcaaggtaaacaaacacgttcagatcttaaacaattaagaaaatctggtaaagtaccagcagtagtatacggttacggtactaaaaacgtgtcagttaaagttgatgaagtagaattcatcaaagttatccgtgaagtaggtcgtaacggtgttatcgaattaggcgttggttctaaaactatcaaagttatggttgcagactaccaattcgatccacttaaaaaccaaattactcacattgacttcttagcaatcaatatgagtgaagaacgtactgttgaagtaccagttcaattagttggtgaagcagtaggcgctaaagaaggcggcgtagttgaacaaccattattcaacttagaagtaactgctactccagacaatattccagaagcaatcgaagtagacattactgaattaaacattaacgacagcttaactgttgctgatgttaaagtaactggcgacttcaaaatcgaaaacgattcagctgaatcagtagtaacagtagttgctccaactgaagaaccaactgaagaagaaatcgaagctatggaaggcgaacaacaaactgaagaaccagaagttgttggcgaaagcaaagaagacgaagaaaaaactgaagagtaattttaatctgttacattaaagtttttatactttgtttaacaagcactgtgcttattttaatataagcatggtgctttttgtgttattataaagcttaattaaactttattactttgtactaaagtttaattaattttagtgagtaaaagacattaaactcaacaatgatacatcataaaaattttaatgtactcgattttaaaatacatacttactaagctaaagaataatgataattgatggcaatggcggaaaatggatgttgtcattataataataaatgaaacaattatgttggaggtaaacacgcatgaaatgtattgtaggtctaggtaatataggtaaacgttttgaacttacaagacataatatcggctttgaagtcgttgattatattttagagaaaaataatttttcattagataaacaaaagtttaaaggtgcatatacaattgaacgaatgaacggcgataaagtgttatttatcgaaccaatgacaatgatgaatttgtcaggtgaagcagttgcaccgattatggattattacaatgttaatccagaagatttaattgtcttatatgatgatttagatttagaacaaggacaagttcgcttaagacaaaaaggaagtgcgggcggtcacaatggtatgaaatcaattattaaaatgcttggtacagaccaatttaaacgtattcgtattggtgtgggaagaccaacgaatggtatgacggtacctgattatgttttacaacgcttttcaaatgatgaaatggtaacgatggaaaaagttatcgaacacgcagcacgcgcaattgaaaagtttgttgaaacatcacgatttgaccatgttatgaatgaatttaatggtgaagtgaaataatgacaatattgacaacgcttataaaagaagataatcattttcaagaccttaatcaggtatttggacaagcaaacacactagtaactggtctttccccgtcagctaaagtgacgatgattgctgaaaaatatgcacaaagtaatcaacagttattattaattaccaataatttataccaagcagataaattagaaacagatttacttcaatttatagatgctgaagaattgtataagtatcctgtgcaagatattatgaccgaagagttttcaacacaaagccctcaactgatgagtgaacgtattagaactttaactgcgttagctcaaggtaagaaagggttatttatcgttcctttaaatggtttgaaaaagtggttaactcctgttgaaatgtggcaaaatcaccaaatgacattgcgtgttggtgaggatatcgatgtggaccaatttcttaacaaattagttaatatggggtacaaacgggaatccgtggtatcgcatattggtgaattctcattgcgaggaggtattatcgatatctttccgctaattggggaaccaatcagaattgagctatttgataccgaaattgattctattcgggattttgatgttgaaacgcagcgttccaaagataatgttgaagaagtcgatatcacaactgcaagtgattatatcattactgaagaagtgatcagccatcttaaagaagagttaaaaactgcatatgaaaatacaagacccaaaatagataaatcagtgcgcaatgatttgaaagaaacgtatgaaagctttaaattattcgaaagtacatactttgatcatcaaatactacgtcgcttagtagcgtttatgtatgaaacaccttcgacaattattgagtatttccaaaaagatgcaatcattgcagttgatgaatttaatcgtattaaagaaactgaagaaagtttaacagtagagtctgattcgtttattagcaatattattgaaagtggtaatggatttataggacaaagttttataaaatatgatgattttgaaacattgattgaaggctatcctgtcacttatttttcattattcgctacaacaatgccgataaaactaaatcatattattaaattttcatgtaaacctgtccaacaattttatgggcaatatgacattatgcgttctgaatttcaacgatatgttaatcaaaactatcatatcgtggttttggtcgaaaccgaaactaaagttgaacgtatgcaagcgatgttaagtgaaatgcatattccatcaataacaaaattgcatcgctcaatgtcatcggggcaagcagtgattattgaaggcagtttatctgaaggatttgaactacctgatatgggattagttgtcattactgagcgtgagctttttaaatcaaaacagaaaaagcaacgaaaacgtacgaaagctatctcaaatgctgaaaaaattaagtcttaccaagatttaaatgtgggagattatattgttcatgtgcatcatggtgttggtagatatttaggtgttgagacgctcgaagtggggcaaacgcatcgtgattatattaaattgcaatataaaggtacggatcaactatttgttccagtagatcaaatggatcaagttcaaaaatatgtagcttcggaagataagacgccaaaattaaataaactcggtggcagtgaatggaaaaaaacaaaagctaaagttcaacaaagtgttgaagatattgctgaagagttgattgatttatataaagaaagagaaatggcagaaggttatcaatatggggaagacacagctgagcaaacaacatttgaattagattttccatatgaacttacgcctgaccaagctaaatctatcgatgaaattaaagatgacatgcaaaaatcgcgtccaatggatcgcttgctatgtggtgatgttggttatggtaaaactgaagttgcagtgagagcagcattcaaagctgtaatggaaggaaagcaggttgcatttttagttcctacaactattttagctcagcaacattatgagacgttaattgagcgtatgcaagattttcctgttgaaattcaattaatgagtcgttttagaacgcctaaagagataaaacaaactaaggaaggacttaaaactggatttgttgacatagttgttggtacacacaaattacttagtaaagatatacagtataaagatttagggctgttgattgtagatgaagaacaacgatttggtgtacgccataaagagcgtattaaaacattaaaacataatgtagatgtactaacattgactgcaaccccaatacctagaacattgcatatgagtatgctaggtgtgcgggatttgtcagtgattgaaacgccgccagaaaatcgtttcccagttcaaacatatgtattagaacagaacatgagttttatcaaagaagctttagaaagagaactatcccgtgatggccaagtgttttatctttataataaagtgcaatccatttatgaaaaacgagaacaactccagatgttaatgccagatgctaacattgcagttgctcatggacaaatgacagagcgcgatttagaagaaacgatgttaagttttatcaataatgaatatgatattttagtaacgacgacgattattgaaacaggtgtcgatgtcccaaatgcaaatactttgatcattgaagatgcagatcgctttggattgagtcagttgtatcaattaagaggtcgtgttggtcgttcaagtcgtattggttatgcatacttcttacatccagcaaataaggtactaactgagactgcagaagatcgattacaagcgattaaagaatttacggagttaggctcaggatttaagattgcgatgcgtgatttgaacattcgtggtgctggtaatttgttaggtaaacaacagcacggctttattgatacagttggatttgatttgtacagtcaaatgttagaagaagctgtaaatgaaaaacgtggtattaaggaaccagaatctgaggtgccagaagtcgaagttgatttaaacttggatgcatatttgccaacagaatatattgcaaatgaacaagctaaaattgaaatttataaaaagctacgaaaaactgaaacatttgatcaaattatcgacattaaagatgaattaattgatcgtttcaatgattatcctgttgaagtagcacgtttgcttgatatagtggaaataaaagtacacgcattacattcaggtatcacgttgattaaagataaagggaaaataattgatattcatttatctgtaaaagccactgaaaatattgatggcgaagtgctgttcaaagcaacacaacctttaggtagaacaatgaaggttggtgttcaaaataatgcaatgacaattactttaacgaaacaaaatcaatggcttgatagtttgaagtttttagttaagtgcattgaagaaagtatgagaatcagtgatgaagcataaagaagcatttaatggcgttgtcgtgttaactgctgcattaattgtcattaaaattctgagtgctgtatatcgaattccatatcaaaatatattaggcgatacaggtttgtatgcatatcaacaagtgtatccaattgtagcattaggaatgatattatcgatgaatgccattcctagtgcaattacacaaaatatagggaagtatcatagtgacgaagcatatgcaaaagcagtcgcttatatacaattagttggtatattattatttattgctatttttgtgtttgcgaacaatattgcacatatgatgggtgatggccatttaacaccaatgattcaagctgcaagtttaagctttatatttataggtatgcttggcgtgttaagaggttattatcaatctgcaaataatatgacagttccggctatttcccaggttatagaacaagttatacgagtaggtattatcattgttactattgttatttttgtagacagaggttggacgatatatgaagcgggaacaattgctattttagcatcaacgataggttttttaggttcttcaatttatttagtagcgcaccgaccttttaagtttaaaatggtaaataacactgcaaagatcgtttggaaacagttcgcactttcggttttgattttcgctatcagtcaattaatcgtaattttatggcaagtgattgatagtgttactattattaagtcacttcaagcgatacgcgtgccattcgatgttgccataactgaaaaaggagtctatgaccgtggtgcatcatttattcagatgggattgattgtaactacaacatttagttttgcgctcattcctctgttaagtgacgcaatcaaaatgaataatcaggtacttatgaatcgttatgcaaatgcgtcattaaagattacgattttaataagtacagcagcgggaataggattaattaatttattgcctttaatgaacggtgtgttttttaagacgaatgatttaaccttaacgttaagtgtttatatgattacggtcatttgtgtatcgttaattatgatggatatggcattattacaagcgcaacatgctgtgagacctatttttgttggtatgacggcaggattggttattaaatttatacttaatatcattttgattcgtttaagtggcattattggtgcgagcattagtactgttgtatcattaattatattcggtacgattatccatattgctgtcacgagaaaataccacttatatgcgatgagacgattttttatcaatgttgttttaggtatggtatttatgtcgattgttgttcaatgcgtgttaaacatagtgacaacacacggtagaatcactggactcattgaattattatgtgcagcagtattaggtatcattgcattgtttttctatatttttagatttaatgttttgacatataaagagttaacttatttaccatttggttcaaagttgtatcaaattaagaaaggaagacgttgatggcacataccattacgattgttggcttaggaaactatggcattgatgatttgccgctagggatatataaatttttaaagacacaagataaagtttatgcaagaacgttagatcatccagttatagaatcattgcaagatgaattaacatttcagagttttgaccatgtttatgaagcacataaccaatttgaagatgtctatattgatattgtggcgcaattggttgaagctgctaatgaaaaagatattgtctatgcggttccgggtcatcctagagttgctgagacaactacagtgaaattactggctttagcaaaggacaatactgatatagatgtgaaagttttaggtgggaaaagctttattgatgatgtgtttgaagcagttaatgtagatccaaatgatggcttcacactgttagatgcgacatcattacaagaagtaacacttaatgttagaacgcatacattgattacgcaagtttatagtgcaatggttgctgctaatttgaaaatcactttaatggaacgatatcctgatgattaccctgttcaaattgtcactggtgcacgaagcgatggtgcggataacgttgtgacatgcccattatatgaattggatcatgatgaaaatgcattcaataatttgacgagtgtattcgtaccaaaaatcataacatcgacatatttgtatcatgactttgattttgcaacggaagtgattgatactttagttgatgaagataaaggttgtccatgggataaagtgcaaacgcatgaaacgctaaagcgttatttacttgaagaaacatttgaattgttcgaagctattgacaatgaagatgattggcatatgattgaagaactaggagatattttattacaagtgttattgcatactagtattggtaaaaaagaagggtatatcgacattaaagaagtgattacaagtcttaatgctaaaatgattcgtagacacccacacatatttggtgatgccaatgctgaaactatcgatgacttaaaagaaatttggtctaaggcgaaagatgctgaaggtaaacagccaagagttaaatttgaaaaagtatttgcagagcattttttaaatttatatgagaagacgaaggataagtcatttgatgaggccgcgttaaagcagtggctagaaaaaggggagagtaatacatgagattagataaatatttaaaagtatcacggttaataaagcgacgtacgctagcaaaagaagtaagtgatcaaggtagaattacaataaatggtaatgttgctaaagctggatcggatgttaaagttgaagatgtgctgacgattcgctttggtcaaaaattagtaacagttaaagtaactgcattaaatgaacatgcatctaaagataacgcgaagggtatgtatgaaatcattgaagagcgtcgacttgaagaagcgtaaattggaggtgacaagcaatgaaaaataaagtagaacatatagaaaatcagtacacgtcgcaagagaacaagaaaaaacaacgtcaaaaaatgaaaatgcgtgttgttcgtaggcgtattacagtatttgcgggcgtattacttgcgataattgttgttttatcaatcttgcttgttgtccaaaaacatcgcaatgatattgatgcacaggagcgaaaagcgaaagaagcacagtttcaaaagcaacaaaatgaagaaattgcgttaaaagaaaagttgaataatctgaatgacaaagattacattgaaaaaattgcgcgtgatgattattacttaagcaacaaaggtgaagtgatttttaggttgccagaagacaaagattcgtctagctcaaaatcttcgaaaaaataaatccaaattgattcaaaattatccgagtatagacattgtgaaaaaatccaaacaaggatataataagggaaaatcgaatcaaatcgggaggatttatttaacatatgtcaatcgaagttggaaataagcttaaaggtaaagtcactggtattaaaaagtttggtgcattcgtagaattacctgaaggaaaaagtggtttagttcacattagtgaagtcgcagataattatgttgaaaacgtagaagagcacctttctgttggtgatgaagtagacgtaaaagtattatctattgctgatgatggaaaaattagtctttcaattaagaaagctaaagaccgtccacgtagacaacatacgagtaaaccaagtcatcaaaaaccagtgcaaaaagccgaagattttgaaaagaaattaagcaatttcttaaaagatagtgaagataaattaacttcaatcaaacgtcaaacagaatctagacgcggtggcaaaggttcaagacgttaattaaaataaataaagactgtttcgataaggaatatatttagaatgatgcgtatcgaataatcgattgcagcgttagacaatctaagactgtttcttaaataaggagcagtctcttttatttgtaatgatataactaagacttataccatttttgaaaattgtaaaagtgaggtgatgttatgcagttaaatagtaatggttggcatgttgatgaccatattgttgtcgctgtttctacaggtattgatagtatgtgtttattgtatcaactactaaatgattataaagatagttatagaaaactaacatgcttacatgtcaatcatggcgttaggtcagcttcaattgaggaagccagatttttagaagcatactgcgaacgtcatcacatcgatttacatatcaaaaagttagatttgtcgcatagtctcgaccgaaataacagcattcagaatgaagctcgaattaaacgttacgaatggtttgatgaaatgatgaatgtattagaagcggatgtattgctaacggcgcatcatttggacgatcaattagaaactattatgtatcgtatttttaatgggaaatcaacacgtaataaactaggatttgatgagttatcgaagcgaaaaggttatcagatttatcgaccacttttagctgtctctaaaaaagaaataaaacaattccaagagagatatcatattccatattttgaagatgaatctaataaagataacaaatatgttagaaatgatattcgtaatagaattattccagctattgatgaaaataatcaacttaaagtatcgcatttattaaaattaaaacaatggcatgatgaacaatatgatattttgcaatattcagctaaacaatttattcaagaatttgtgaagtttgatgaacagtcaaaatatttagaggtttctagacaagcttttaataacttaccaaactcattaaagatggttgtgttggactgcctattatcaaagtattatgagttgtttaatattagtgctaaaacatacgaagagtggtttaaacaatttagtagtaagaaagcacaattcagtattaatctcacggataaatggataattcaaatcgcatatggtaaattaataataatggctaaaaataatggcgatacatattttagagttcaaacaattaaaaagccaggtaattatatttttaacaaatatcgattagagatacattctaatttaccaaaatgtttatttccgcttacagtgagaacacgacaaagtggcgatacatttaaactgaatgggcgcgatggttataagaaagtgaatcgcctgtttatagattgtaaagtgccacagtgggttcgggatcaaatgccaatcgtattggataaacaacagcgcattattgcggtaggagatttatatcaacaacaaacaataaaaaaatggattataattagtaaaaatggagatgaatagcgttatgcataatgatttgaaagaagtattgttaactgaagaagatattcaaaatatctgtaaggaattgggagcacaattaacaaaggattatcaaggtaaaccattagtatgcgtgggtatcttaaaaggctcagcaatgtttatgtcagatttaattaaacgaattgatacccatttatcaattgatttcatggatgtttctagttatcacggaggcactgagttaactggtgaagttcaaatcattaaagatttaggttcttctattgaaaataaagacgtattaattattgaagatatcttagagactggtactacacttaagtcaattactgaattattacaatctagaaaagttaattcattagaaatagttactttattagataaaccaaaccgtcgtaaagcggacattgaagctaagtatgtaggtaaaaaaataccagatgaatttgttgttggttacggtttagattatcgtgaattataccgaaacttaccatatatcggtacgttaaaacctgaagtgtattcaaattaattttttaatcaatttcagttattattactatgcgtttgagaaataatagtgtagactcaaaaatatgaaaaatgtatttcatatatatttaattttagacaagacatatgtcttgaaaagttgaaaaatatagagattgataaaactaatacgggtgtgaatgacattgatgttaagctcaattactagcttataaaacatgtcatatgttacaatttttgttagttttattatgggaagtaggaggaaatgacgcatgcagaaagcttttcgcaatgtgctagttatcgtaataataggcgttattatttttggtctattttcatatttaaacggtaatggaaatatgccgaaacagcttacatataatcaatttactgagaagttggaaaaaggtgaccttaaaactttagaaatccaaccacaacaaaatgtctatatggtaagtggtaaaacgaaaaatgatgaagactattcatcaactattttatataacaacgaaaaagaattacaaaaaattactgatgctgctaaaaagcaaaacggtgtaaaattaacgattaaagaagaagaaaaacaaagtgtctttgtgagtatactttcaacattaattccagttgtagtcatagcgttattatttattttcttcctaagccaagcacaaggtggcggtagtggcggtcgtatgatgaactttggtaaatctaaagcaaaaatgtacgataataataaacgtcgtgttcgtttctctgatgtagcaggggcagatgaagaaaaacaagaattaattgaaattgttgatttcttgaaagataataaaaaattcaaagaaatgggatctaggattcctaaaggtgtcttacttgttggacctccaggtactggtaaaacattacttgctagagcggttgcaggtgaagctggcgcaccattcttctctattagtggttcagactttgtagagatgtttgttggtgttggtgcgagccgtgttcgtgacttattcgataatgctaagaaaaacgcgccttgtatcatctttatcgatgagattgatgctgttggtcgtcaacgtggtgcaggtgttggtggcggtcatgatgaacgtgaacaaaccctaaaccaattattagttgaaatggatggtttcggtgaaaatgaaggtatcattatgatagctgctacaaaccgtcctgatatccttgacccagccttattacgtccaggtcgttttgatagacaaattcaagttggtcgtccagatgtgaaaggccgtgaagcaattcttcatgttcatgctaaaaacaaaccacttgatgaaacggttgatttaaaagcaatttcacaacgtacacctggtttctcaggtgctgatttagagaacttattaaatgaagcatctttaattgctgtacgtgaaggtaaaaagaaaattgacatgagagatatcgaagaggcaacggatagagttatagccggacctgctaagaaatctcgagttatttctaagaaagaacgtaatattgttgctcatcacgaagctggtcatacaattatcggtatggtacttgatgaggcagaagtagtgcataaagttactattgttccacgtggacaagcaggtggttatgcaatgatgctacctaaacaagatcgtttcttaatgactgaacaagagttattagataaaatctgtggtttacttggtggacgtgtatcagaagatattaactttaacgaagtatcaacaggtgcttcaaatgacttcgaacgtgcaacacaaatcgcacgctcaatggttacgcaatatggtatgagtaaaaaattaggaccattacagttcggtcatagcaatggtcaagtattcttaggtaaagatatgcaaggtgagcctaattattcaagccaaatcgcatatgaaattgataaagaagttcaacgaatcgttaaagaacaatacgaacgttgtaaacaaattttattagagcacaaagaacaattaattttaattgctgaaacattattaacagaagaaacattagttgctgaacaaattcaatcattattctacgaaggtaaattacctgaaattgattatgatgcagctaaagttgttaaagatgaagattctgaatttaatgatggtaaattcggtaaatcttatgaagagattcgtaaagagcaattagaagatggacaacgtgacgaaagtgaagatcgtaaagaagaaaaagatattgctgaggataaaaaagaagctgataaatctgatgaaaaagatgaaccagcacatcgacaagccccaaatatcgaaaaaccttacgatccaaatcacccagacaataaataatcgattatattcagtacctctttctatgataaagttatagaaagaggtacttttatcgtttttgaaaatacgtattagattttaagtcgttgaattgttatagcagaaaataattgtaaaacaagttacttcattatttagaatgatgggtgtagaataagtacaattgttgcattttatgaagtaaagtaattttttaaatatagagtaatagaggagattgaaataatgacacacgattatattgttaaagcattagcatttgatggagagattagggcttatgctgctttgacaactgaaactgttcaagaagcacaaacgagacattatacatggccgacagcatctgctgcaatgggaagaacaatgacagcaacagctatgatgggcgcaatgttgaaaggtgatcaaaaattaactgtcactgtagatggccaaggacctattggacgaattattgccgatgcaaatgctaaaggcgaggtgcgtgcttatgtagaccatccacaaactcattttccattaaatgagcaaggtaaacttgatgtaagacgagcggtagggacaaatggatctattatggttgttaaagacgttggaatgaaagactatttctctggagcaagtccaattgtttcaggagaacttggtgaagattttacttattattatgctacaagtgaacaaacaccttcatcggtaggtcttggtgtattggtaaatcctgataatacgattaaagcagcaggaggatttatcattcaagttatgccaggtgccaaagatgaaacaatttcaaaattagaaaaagcaattagtgaaatgacaccagtttctaaattaattgaacaaggattaacgccagaaggattactaaacgaaatcttaggtgaagaccatgtgcaaattttagagaaaatgcctgttcaatttgaatgtaattgtagtcatgagaaatttttaaatgctattaaaggattgggcgaggctgagattcaaaatatgattaaagaagatcatggtgctgaagcagtatgtcatttctgtggaaataaatataaatatactgaagaagaattaaacgtgttgctagaaagtttagcgtaatttaatttaaatcaatacgctaaaatgtttatttttagcggtttagtgaaatgtagaactaaatagttgtataatccttagtgattttgtttgctttctagaatttatttgataaaataattctatatccgataaataaactaagatttcaacaactaactaaaaaggagtgttcttaatggcacaaaaaccagtagataatattactcaaattattggcggtacaccggtagtcaaattgagaaatgtagtagatgacaatgcagcagatgtttatgtaaaattggaatatcaaaatccaggtggttctgtaaaggatagaattgctttagcaatgattgaaaaagcagagcgagaaggcaaaattaaacctggcgatacaattgtagaaccaacaagtggtaatacaggtatcggtttagcatttgtatgtgctgctaaaggatataaagcagtatttactatgcccgaaacaatgagccaagagcgtcgtaatttattaaaagcatacggtgcggaattagttttaacgcctggatcagaagcgatgaaaggtgcaattaaaaaagctaaagaattgaaagaagaacatggttacttcgagccacaacaatttgaaaaccctgcgaaccctgaagttcatgagttaactacaggtcctgagttattacaacaatttgaagggaaaactatcgatgcgttcctagctggtgttggtactggtggtacgttatctggtgtaggtaaagttctgaaaaaagaatatcctaacatcgaaattgttgctatagagcctgaggcttctccagtattgagcggtggtgagccaggtccacataaattacaaggtttaggtgctggatttattccaggcactttgaatacagaaatctatgacagtattattaaagtaggaaatgatacagcgatggaaatgtctcgtcgagttgctaaagaggaaggtattttagcaggtatttcatcaggtgctgcgatttatgctgccattcaaaaagcaaaagaattaggaaaaggtaaaacagtagtaacagtattgccgagtaatggtgaacgctacttatcaacacctttatattcattcgatgactaattaatgtcatttaaaagagtgagttatctttttgagataacttgctctttttttctaccatgtatatttttaaaaatatgagcgttaaattaaacatttttctgataaaaatatccagtgaatgataagataataaacgtacatactaataactagtaaatagcaggagtaaattttattagagttaaacaatacataattaaagggtggttaacatgactaaaacaaaaattatgggcatattaaacgtcacacctgattcattctcagatggtggaaaatttaataatgttgaatcagctataaatagagtgaaagccatgatagatgaaggtgctgacattatagatgttggaggtgtttcaacgagacccggtcatgaaatggtttcattagaagaagagatgaacagagtattacctgttgttgaagctattgtcggttttgatgtaaaaatttcagtcgatacatttcgaagtgaggttgctgaagcatgtttaaaattaggcgttgatatgattaatgatcaatgggcgggtctgtatgatcatcgtatgttccaaattgtagctaaatatgacgcggaaattattttaatgcataatggaaatggtaatcgtgatgaaccggttgtcgaagaaatgttaacatctttgttagcacaagcacatcaagctaaaatagctggtataccttcaaataaaatttggctagatccaggtataggtttcgctaaaactagaaatgaagaagccgaagttatggcaagactggatgaacttgttgcaacagaatatccagttttattagcgacaagccggaaacgtttcactaaagagatgatgggttatgatacaacaccggttgaaagagatgaagtaactgcagctacgactgcatatggtattatgaaaggcgttagagcagtacgcgttcataatgtcgagttgaatgctaaattagctaaaggtatagattttttaaaggagaatgaaaatgcaagacacaatctttcttaaaggtatgcgcttttatggatatcatggtgctttatcagctgaaaatgaaatagggcaaattttcaaagtggatgtaactttgaaagtagacttagctgaagctgggcgtactgataatgttattgatacagttcattatggtgaagtgttcgaagaggttaaatcaattatggaaggtaaggccgttaatttacttgagcatctagctgaacgtattgcaaatcgtataaattcacaatataatcgtgtaatggaaacgaaagtgagaatcactaaagaaaacccaccgattccgggtcattatgatggagtaggtatcgaaatagtgagggagaataaatgattcaagcatacttaggattaggtagtaatattggtgatagagaaagccagttaaacgatgctataaagattttgaatgaatatgatggtattaacgtatctaatatttctccgatttatgaaacagcaccagttgggtatactgagcaacctaactttttaaatttgtgtgttgaaattcaaacaacactcacagtattacaactgttggaatgttgtttgaagacagaagaatgtttacaccgtattagaaaggaacgatggggtcctagaactttagatgtggatattttgttgtatggagaagaaatgatagatttaccaaaactgtcggtgccacatccgagaatgaatgaacgtgcatttgttttaatcccattaaatgatatagcagcaaatgtcgtagaaccacgttcgaaattgaaagtgaaagatttagtttttgtcgatgacagtgtaaagagatataaataatgtattgttgagaacattcatatttattgggaatagattattgattattggagatgtttccgcattttgattatctctaaatgcatttgatttcgaattagtatatgatgatttagtatgtgttagaattaagttatttcataaaatcaaagtaagcaatatttgataaattgctgtaatttatttaggcttttgttgaagtttgtggaagataatttttatacatttacttagggttgtattaatgataatcgtattttaaatgaataagtaattcataaacgaaaacagaaattgctttattacatttacaagctcttgtaaaattaaaaaagtgataaaattgatgttatgaatataagaaaacatgccacatcataactttaaggtgtaatggttaatgataaagtattagaaacatcgaaagagatgtatgttgagcaaaaatgtctgatattttataaaactttaaaggaaaatgtttgagtgtaccagttggaatactaaaggattacaacaagttaaaggagagaaagttatgtcagaagaaatgaatgaccaaatgttggttcgacgtcaaaaattacaagaattatatgatcttggtatagacccgtttggttctaaatttgaccgttcaggtttatctagtgatttgaaagaagagtgggaccagtattctaaagaagaattggtagaaaaagaagcggatagtcatgtcgctatagctggacgattaatgactaagcgtggtaaaggtaaagcaggatttgcacacgttcaggacttagctggacaaattcaaatttacgttcgtaaagatcaagttggcgatgacgaatttgatttatggaaaaatgctgatttaggcgatatcgttggtgttgaaggtgtaatgttcaaaacaaatactggcgaattatcggttaaagcgaagaaattcacgctactaactaaatcattgcgaccattaccggataaattccacggtttacaggatattgaacagagatatcgtcaaagatatttagatttaattacgaacgaagatagcactcgtacatttattaatcgtagtaaaatcattcaagaaatgcgtaattatttaaataataaaggtttcttggaagtagaaacacctatgatgcaccaaattgctggtggagcagctgctagaccatttgtaacacatcataatgcattagatgcaacgttatacatgcgtattgctattgagttgcatttaaaacgtttaattgtcggtggacttgaaaaagtatatgaaattggtagagtattccgtaatgaaggtgtatcaactagacataaccctgaattcacaatgattgaattatatgaagcatatgcagattatcatgacattatggatttaacagaatctatggtgagacatattgccaatgaagtgttaggttctgcaaaagtacaatacaatggggaaacgattgatttagaatctgcttggactcgtttgcatattgttgatgctgtaaaagaagctactggtgtagatttttatgaagttaaaagtgatgaagaagctaaagctttagctaaagaacatggtattgaaattaaagatacaatgaaatatggtcatattttaaatgaattctttgagcaaaaagttgaagaaacacttattcagccaacgtttatctatggtcatccgactgaaatttcacctttagcgaagaaaaatcctgaagatcctagatttactgatcgtttcgaattgttcattgtaggtagagagcatgcaaatgcatttactgaattaaatgatcctattgatcaaaaaggtcgttttgaagcgcaacttgttgaaaaagcgcaaggtaatgatgaagcgcatgaaatggatgaagattacattgaagcgttagaatatggtatgcctccgacaggtggtcttggtatcggtattgacagattggttatgttattaactgactctccatcaatcagagacgtattattattcccttatatgagacaaaaataaatgacgttgattgttagtaagagctctcgtgtatacaacatgtgtatgcgagggctttcttaattatggtaattagttcgtgtttgaatgtttttgatagtaatagttaacgatagtggtgctatttttgactgttaaacaaggtagttggctgatagatgaaaatgacgatacgtatatagagtagttcggatgagaaatgttaacgatagacattgagatatcttataacaaaaattgctatattagtataatttatcttaatcagctataaaagtactttaaaattgtatagaatgtgtatggttttgtacatatgtgtatgatagaatactaaaagtgttatgaattagagggcacgagaaatgtcagttttgaagaataaaaaagttgattaaaagtgttgactttatcaattgaatgaagtaatatataaaagtcgtcaaaaacagacgaaacacactaaaagctgatgtgacaaagtttacatcaaagtgtaaaattaactattgcaccttattaattaagcgtgtatcatgaataagtaagttattttgtctggtgactatagcaaggaggtcacacctgttcccatgccgaacacagaagttaagctccttagcgtcgatggtagtcgaacttacgttccgctagagtagaacgttgccaggcaaatgacaaatcggagaattagctcagctgggagagcatctgccttacaagcagagggtcggcggttcgaacccgtcattctccaccatttattcttagatatagccggcctagctcaattggtagagcaactgacttgtaatcagtaggttgggggttcaagtcctctggccggcaccatcttttgagccattagctcagctggtagagcatctgacttttaatcagagggtcagaggttcgaatcctctatggctcattacgatttaatttttatatttagcaaaataatgcagaagtagttcagcggtagaatacaaccttgccaaggttggggtcgcgggttcgaatcccgtcttctgctccattattttgccggggtggcggaactggcagacgcacaggacttaaaatcctgcggtgagagatcaccgtaccggttcgattccggtcctcggcaccattttagcgcccgtagctcaattggatagagcgtttgactacggatcaagaggttatgggttcgactcctatcgggcgcgccatttttaaattaattgaataacgggaagtagctcagcttggtagagcacttggtttgggaccaaggggtcgcaggttcgaatcctgtcttcccgattacttcttaaattccattttatgggggcttagctcagctgggagagcgcctgctttgcacgcaggaggtcagcggttcgatcccgctagtctccaccatttattttttacacgatgaacattgaaaactgaatgacaatatgtcaacgttaattccaaaaacgtaactataagttacaaacattatttagtatttatgagctaatcaaacatcataatttttatggagagtttgatcctggctcaggatgaacgctggcggcgtgcctaatacatgcaagtcgagcgaacggacgagaagcttgcttctctgatgttagcggcggacgggtgagtaacacgtggataacctacctataagactgggataacttcgggaaaccggagctaataccggataatattttgaaccgcatggttcaaaagtgaaagacggtcttgctgtcacttatagatggatccgcgctgcattagctagttggtaaggtaacggcttaccaaggcaacgatgcatagccgacctgagagggtgatcggccacactggaactgagacacggtccagactcctacgggaggcagcagtagggaatcttccgcaatgggcgaaagcctgacggagcaacgccgcgtgagtgatgaaggtcttcggatcgtaaaactctgttattagggaagaacatatgtgtaagtaactgtgcacatcttgacggtacctaatcagaaagccacggctaactacgtgccagcagccgcggtaatacgtaggtggcaagcgttatccggaattattgggcgtaaagcgcgcgtaggcggttttttaagtctgatgtgaaagcccacggctcaaccgtggagggtcattggaaactggaaaacttgagtgcagaagaggaaagtggaattccatgtgtagcggtgaaatgcgcagagatatggaggaacaccagtggcgaaggcgactttctggtctgtaactgacgctgatgtgcgaaagcgtggggatcaaacaggattagataccctggtagtccacgccgtaaacgatgagtgctaagtgttagggggtttccgccccttagtgctgcagctaacgcattaagcactccgcctggggagtacgaccgcaaggttgaaactcaaaggaattgacggggacccgcacaagcggtggagcatgtggtttaattcgaagcaacgcgaagaaccttaccaaatcttgacatcctttgacaactctagagatagagccttccccttcgggggacaaagtgacaggtggtgcatggttgtcgtcagctcgtgtcgtgagatgttgggttaagtcccgcaacgagcgcaacccttaagcttagttgccatcattaagttgggcactctaagttgactgccggtgacaaaccggaggaaggtggggatgacgtcaaatcatcatgccccttatgatttgggctacacacgtgctacaatggacaatacaaagggcagcgaaaccgcgaggtcaagcaaatcccataaagttgttctcagttcggattgtagtctgcaactcgactacatgaagctggaatcgctagtaatcgtagatcagcatgctacggtgaatacgttcccgggtcttgtacacaccgcccgtcacaccacgagagtttgtaacacccgaagccggtggagtaaccttttaggagctagccgtcgaaggtgggacaaatgattggggtgaagtcgtaacaaggtagccgtatcggaaggtgcggctggatcacctcctttctaaggatatattcggaacatcttcttcagaagatgcggaataacgtgacatattgtattcagttttgaatgtttatttaacattcaaatattttttggttaaagtgatattgcttatgaaaataaagcagtatgcgagcgcttgactaaaaagaaattgtacattgaaaactagataagtaagtaaaatatagattttaccaagcaaaaccgagtgaataaagagttttaaataagcttgaattcataagaaataatcgctagtgttcgaaagaacactcacaagattaataacgcgtttaaatctttttataaaagaacgtaacttcatgttaacgtttgacttataaaaatggtggaaacatagattaagttattaagggcgcacggtggatgccttggcactagaagccgatgaaggacgttactaacgacgatatgctttggggagctgtaagtaagctttgatccagagatttccgaatggggaaacccagcatgagttatgtcatgttatcgatatgtgaatacatagcatatcagaaggcacacccggagaactgaaacatcttagtacccggaggaagagaaagaaaattcgattcccttagtagcggcgagcgaaatgggaagagcccaaaccaacaagcttgcttgttggggttgtaggacactctatacggagttacaaaggacgacattagacgaatcatctggaaagatgaatcaaagaaggtaataatcctgtagtcgaaaatgttgtctctcttgagtggatcctgagtacgacggagcacgtgaaattccgtcggaatctgggaggaccatctcctaaggctaaatactctctagtgaccgatagtgaaccagtaccgtgagggaaaggtgaaaagcaccccggaaggggagtgaaatagaacctgaaaccgtgtgcttacaagtagtcagagcccgttaatgggtgatggcgtgccttttgtagaatgaaccggcgagttacgatttgatgcaaggttaagcagtaaatgtggagccgtagcgaaagcgagtctgaatagggcgtttagtatttggtcgtagacccgaaaccaggtgatctacccttggtcaggttgaagttcaggtaacactgaatggaggaccgaaccgacttacgttgaaaagtgagcggatgaactgagggtagcggagaaattccaatcgaacctggagatagctggttctctccgaaatagctttagggctagcctcaagtgatgattattggaggtagagcactgtttggacgaggggcccctctcgggttaccgaattcagacaaactccgaatgccaattaatttaacttgggagtcagaacatgggtgataaggtccgtgttcgaaagggaaacagcccagaccaccagctaaggtcccaaaatatatgttaagtggaaaaggatgtggcgttgcccagacaactaggatgttggcttagaagcagccatcatttaaagagtgcgtaatagctcactagtcgagtgacactgcgccgaaaatgtaccggggctaaacatattaccgaagctgtggattgtcctttggacaatggtaggagagcgttctaagggcgttgaagcatgatcgtaaggacatgtggagcgcttagaagtgagaatgccggtgtgagtcgcgaaagacgggtgagaatcccgtccaccgattgactaaggtttccagaggaaggctcgtccgctctgggttagtcgggtcctaagctgaggccgacaggcgtaggcgatggataacaggttgatattcctgtaccacctataatcgttttaatcgatggggggacgcagtaggataggcgaagcgtgcgattggattgcacgtctaagcagtaaggctgagtattaggcaaatccggtactcgttaaggctgagctgtgatggggagaagacattgagtcttcgagtcgttgatttcacactgccgagaaaagcctctagatagaaaataggtgcccgtaccgcaaaccgacacaggtagtcaagatgagaattctaaggtgagcgagcgaactctcgttaaggaactcggcaaaatgaccccgtaacttcgggagaaggggtgctctttagggttaacgcccagaagagccgcagtgaataggcccaagcgactgtttatcaaaaacacaggtctctgctaaaccgtaaggtgatgtataggggctgacgcctgcccggtgctggaaggttaagaggagtggttagcttctgcgaagctacgaatcgaagccccagtaaacggcggccgtaactataacggtcctaaggtagcgaaattccttgtcgggtaagttccgacccgcacgaaaggcgtaacgatttgggcactgtctcaacgagagactcggtgaaatcatagtacctgtgaagatgcaggttacccgcgacaggacggaaagaccccgtggagctttactgtagcctgatattgaaattcggcacagcttgtacaggataggtaggagcctttgaaacgtgagcgctagcttacgtggaggcgctggtgggatactaccctagctgtgttggctttctaacccgcaccacttatcgtggtgggagacagtgtcaggcgggcagtttgactggggcggtcgcctcctaaaaggtaacggaggcgctcaaaggttccctcagaatggttggaaatcattcatagagtgtaaaggcataagggagcttgactgcgagacctacaagtcgagcagggtcgaaagacggacttagtgatccggtggttccgcatggaagggccatcgctcaacggataaaagctaccccggggataacaggcttatctcccccaagagttcacatcgacggggaggtttggcacctcgatgtcggctcatcgcatcctggggctgtagtcggtcccaagggttgggctgttcgcccattaaagcggtacgcgagctgggttcagaacgtcgtgagacagttcggtccctatccgtcgtgggcgtaggaaatttgagaggagctgtccttagtacgagaggaccgggatggacatacctctggtgtaccagttgtcgtgccaacggcatagctgggtagctatgtgtggacgggataagtgctgaaagcatctaagcatgaagcccccctcaagatgagatttcccaacttcggttataagatccctcaaagatgatgaggttaataggttcgaggtggaagcatggtgacatgtggagctgacgaatactaatcgatcgaagacttaatcaaaataaatgttttgcgaagcaaaatcacttttacttactatctagttttgaatgtataaattacattcatatgtctggtgactatagcaaggaggtcacacctgttcccatgccgaacacagaagttaagctccttagcgtcgatggtagtcgaacttacgttccgctagagtagaacgttgccaggcaaaaaatggatgcgatgagccgcattgagaccgcaaggtctcttttttttatgtctaaaacgtcaaaataaaaagcaaacacaaagaaaaatggcttggcgaagtgaaaacgtttgaatctgacgaaacgagaaaagaacgcaacgagtttagtagagctaaatgagtaagtgagagccgaaggagaggaaagaagcaagcgattgtcacaagtcaagaaaggttcttagcgaggatggtagccaacttacgttccgctagagtagaactggaaatgataatttaataatgtacactttcgattgtctaagtatgtacaactttaattttgtgtttatataaatttaaaatgatatcatcgaaaacaaaatattgtataaatagagaagagcagtaagacggtatctaattgaaaatgatcttactgctcttttatatactttattgaaatacaaaaaggaaattaattattatacaatagacaagctattgcataagtaacactaacttttatcaaagaagtgttactttataattaatgattttattagagcgtctacatgcggttttaaagcatcatcgtctataccgccaaagcctaatataaatttaggggttttcttatagtcttgatcatcatcaaaattataaacttgtaattttaactttactttgtttgctctatcaagacactcttgtaatgttaatccattttttactgtaattgtaaaatgcatacccgtttcagcaccttgaatatcaagctgctctttgtaaggtttcaatctttttaaaatataggttagttttctacgataaattcgtctcattttatttaaatgcctttcaaaaccaccggaagatataaacgttgcaataaggttttgcatatgaacaggtacagtgttgccttcaatgtgattttgagaatgatattttttcattatagaatagggtaacaccatatatgcaactcgacagctaggaaaaatagactttgaaaatgtactgatataaatcactttttctcctcttgaatatagaccttgaattgctggaatgggtttgccgaaatatctaaactcggaatcataatcatcttctataataaatcgttcttctttttcttgagcccattgtattaattgagttcgtttttttaagtccatcacatatccagttggaaattgatgggaaggcgttatatatactatatttttttgtgatttaataacttcatctacgtttattccattatcttcaacttcaatttgttcatattcaacttgttttttatctaaaatatttttgattggtggataactaggtttttcgataataaatgttgaagtataaagtaaatcgactaattgatttactaattgttcggtagatgagccaattataatttgattaggatcacaaattacgccacgattagtaaataaataaaatgccagttgaaaccgcaaatgtaattctccttgaaaatgtcctctacgtaattgatttaaatgatttgtatcataaagatctttggaatactttctgaaaagttctatagggaaatgtttcgtatctatttcatccaaattaaaagcataatcataagcttcatcactcgcttttggtttatatgaatcatcatcaaaaagagaggggataggttgattgtttaaaattgttaaagattcaatttcggacacaaaatatccagagcgaggtcttgaataaatgtaaccttcgtctaatagaagttgatatgcatgctctacggttgtttggctaatagataaatgtttgcttaattgtcttttagaataaaatttatcgccttctttaaattgaccttcaattatttgtttttttaatttttcataaagttgatggtataaagtgtttttcaattttataactgacctcctaaatttatcttattttgtacctttttaaatatcagtttatacattacaatgtatttaatcaacttgaaaaggggttttatgtataatgagtaaaattattggatcagacagagtcaaaagaggtatggctgaaatgcaaaaaggcggcgttattatggatgtcgttaatgctgagcaagcaagaattgcagaagaagctggcgcggtagcagttatggcattagaacgagtaccttctgatattagagctgctggtggtgttgcacgtatggcaaaccctaaaattgtagaagaagtaatgaatgctgtttctattccagtcatggctaaagcacgtattggtcatatcactgaagcaagagtattagaggcgatgggtgttgactatattgatgaatcagaagtgttaacaccagcagatgaggaatatcacttaagaaaagatcaatttacagtaccatttgtatgtggatgtcgtaatttaggtgaagctgcgcgtagaattggtgaaggtgctgctatgttacgtactaaaggtgaaccaggtacaggtaatattgttgaagctgtaagacatatgagacaagttaattcagaagttagtcgattgactgtaatgaatgatgatgagattatgacttttgcgaaagatatcggtgcgccttatgaaattttaaaacaaattaaagacaatggtcgtttaccggtagttaactttgcagctggtggcgttgcgactcctcaagatgctgctttaatgatggaattaggtgctgacggtgtattcgttggatcaggtatttttaaatcagaagatccagaaaaatttgctaaagcaattgttcaagcaacaacacattaccaagactatgaactaattggaagattagcaagtgaacttggcactgctatgaaaggtttagatatcaatcaattatcattagaagaacgtatgcaagagcgtggttggtaagatatgaaaataggtgtattagcattacaaggtgcagtacgtgaacatattagacatattgaattaagtggtcatgaaggtattgcagttaaaaaagttgaacaattagaagaaatcgagggcttaatattacctggtggcgagtctacaacgttacgtcgattaatgaatttatatggatttaaagaggctttacaaaattcaactttacctatgtttggtacatgcgcaggattaatagttctagcgcaagatatagttggtgaagaaggataccttaacaagttgaatattactgtacaacgaaactcattcggtagacaagttgacagctttgaaacagaattagatattaaaggtatcgctacagatattgaaggtgtctttataagagccccacatattgaaaaagtaggtcaaggcgtagatatcctatgtaaggttaatgagaaaattgtagctgttcagcaaggtaaatatttaggcgtatcattccatcctgaattaacagatgactatagagtaactgattactttattaatcatattgtaaaaaaagcatagcttaatgtatgctaaatcaacgaattattgatatttatagatttgttgagaagaaaatatctccttcaaacttagctttggaggagttattttttatgtcaaaattaaaaatgataaaaaataaagctatacataagaaaaaaacccttcaaagagactgagaatagtcaaaattttgaaggggttaattcgatgttgatgtatttgttaaataaagaatccagcgattgcagctgaaatgaaagatactagtgttgcaccgaataataatttcaaaccaaagcgggcaactgtatctccttttttgtcattaagtgatttaatcgcacctgaaataataccgatagagctaaagttagcaaatgatactaagaatacagatgtaacaccttttgcgtgttcagataaatcactaagtttaccaagtgcttgcattgctacaaattcgttagataatagttttgtcgccataactgaaccggcttgaactgcatcttgccatggcacaccgactaagaatgcaaatggtgcaaagacaaaaccaattaatgtttggaaatcccaagaaatagcgccacctgaaactgtactaaagatattgcttacaattccatttaatagagcgataatggcaatgtatccgattaacattgcgcctacaatgacagctactttaaatccatctaaaatatattctcctagcatttcgaagaatgattgttgtctttcttcagtttcttcaactaataatttgtcatcttcttcattaactttataagggttaataattgaagcgatgatgaaaccaccaaataagtttaagacaacagccgttacaacatatttaggttcaattaaggtaaagtatgcaccgataattgaagcagaaacagtcgacattgctgaagctgttaatgtgtataaacgttgcttaggtatgtatggtaattgttttttaattgaaataaatacttcagattgtcccaaaattgctgcagcaactgcattgtatgattctaaacgtcccataccattaattttagaaattaagaatcctaaaacattaatgattaaaggtaaaatctttgtgtattgaaggataccgataatcgctgaaataaatacgataggtaataatacactgaagaagaatggtggttgcttaggatcgatatattgaataccaccgaatacaaagttaacaccatctgctgcttttaataataagtagttaaaaccgtttgaaataccaccaataaccttgattcccattgtagttttaagcaagataaatgcaaagataagctgaattgcaagtaaaattcctacatatttccagcgaatatttttcctgtctgagctaaatagaaacgcaagtgctaaaaagaagataattccgataatcccaattagaatatgcatatatttctcattcctttagttttttctacaatctatcatacaataaaatggaagggctaacatcataaatttttgaaaatataaaaacaaattaattgaaaaaggtcaaaataggtcatataatatagtcaaagaaggtcaaaaaggggtgatatacatgcacaatatgtctgacatcatagaacaatacatcaaacgtttatttgaagagtcgaatgaagatgtcgttgaaattcagagagcgaatatcgcacagcgttttgattgcgtaccatcacaattaaattatgtaatcaaaacacgattcactaatgaacatggttatgaaatcgaaagtaaacgtggtggtggtggttacatccgaatcactaaaattgaaaataaagatgcaacaggttatattaatcatttgcttcagctgattggaccttctatttctcaacaacaagcttattatattattgatgggcttttagataaaatgttaataaatgaacgtgaagctaaaatgattcaagcagttattgatagagaaacgctatcaatggatatggtttctagagatattattagagcaaatattttaaaacgtttgttaccagttataaattattactaaatgaaatgaggtgttgaagtgctttgtgaaaattgtcaacttaatgaagcggaattaaaagttaaagttacaagtaaaaataaaacagaagaaaaaatggtgtgtcaaacttgtgctgaggggcaccatccgtggaatcaagctaatgaacaacctgaatatcaagaacatcaagataatttcgaagaagcatttgttgttaagcaaattttacaacatttagctacgaaacatggaattaattttcaagaagtagcgtttaaagaagaaaaacgttgcccatcatgtcatatgactttgaaagatattgcacatgttggtaaatttgggtgtgctaattgttatgcaacatttaaagatgacatcattgatatcgtccgcagagttcaaggtggacaatttgagcacgttggaaagacaccacattcttcacataaaaagatagctttaaagcgaaaaatcgaagaaaagaatgaatatttgaaaaaacttattgaaatccaagattttgaggaagcagccattgttagagatgaaattaaagcactaaaagctgagagtgaggtgcaacatgatgacgcataatattcatgataatatcagccaatggatgaaaagtaatgaagaaacaccaattgttatgtcttctagaattcggttagcgcgtaatttagaaaatcatgtgcatccactaatgtatgctactgaaaatgatggatttagagttataaatgaggtacaagatgccttgccaaactttgaattaatgcgtcttgatcaaatggatcaacaaagtaaaatgaaaatggttgcaaagcatttgattagtcctgaactaataaaacaaccagcagccgcagtattagtgaatgacgatgaatctttaagtgtcatgataaatgaagaggaccatattcgtattcaagctatgggaactgacacgacattacaggctttatataatcaagcttcatcaattgatgatgaattagatcgaagccttgatataagttatgatgaacaacttggttatttaactacatgtcctaccaatataggtactggtatgagagcaagcgtgatgctacatttgccaggtctatctattatgaaaagaatgacacggattgctcaaaccattaatcgttttggatatacaatcagaggtatttacggtgaaggttcgcaagtttatggacatacttatcaagtatccaaccaacttacacttggtaaatctgagttagaaatcatagaaacattaacagaagttgttaatcaaatcattcatgaagaaaaacaaatacgacaaaagttagacacttataatcaattagaaacacaagaccgtgtttttcgctcgctaggtattttacaaaactgtagaatgataactatggaagaggcttcttatagattaagcgaagttaaacttggtatagatttaaattacattgaattacaaaactttaaatttaatgaattgatggtagctatacagtcaccatttttattagatgaagaagatgacaaatctgtaaaagaaaaacgagcagatatactaagagaacatataaagtaggaggtcattatttatgttatttggtagattaactgagcgtgcacagcgcgtattagcacatgcccaagaagaagcaattcgtttaaatcattcaaatataggaacagaacacctattattggggttaatgaaagaacctgaaggaattgctgcaaaagtattagaaagttttaatatcactgaagataaagtaattgaagaagttgaaaaattaatcggacatggtcaagatcatgttggtacattgcattatacacctagagctaaaaaagtcattgaattatcgatggatgaagctagaaaattacatcacaattttgttggaacggaacatattttattaggcttgattcgtgaaaatgaaggtgttgcagcaagagtttttgcaaatctagatttaaatattactaaagcacgtgcacaagttgtgaaagctttaggaaaccctgaaatgagtaataaaaatgcacaagctagtaagtcaaataatactccaactttagatagtttagctcgtgacttaacagtcattgccaaagacggtacattagatcctgttataggacgtgataaagaaattacacgtgtaattgaagtattaagtagacgtacgaaaaacaatcctgtgcttattggagagccaggtgttggtaaaactgctattgctgaaggtttagcgcaagccatagtgaataatgaggtaccagagacattaaaagataagcgtgttatgtctttagatatgggaacagtagttgcaggtactaaatatcgtggtgaatttgaagagcgtctgaaaaaggttatggaagaaatccaacaagcaggtaatgtcatcctatttattgatgagttgcatactttagttggtgctggtggtgctgaaggtgctatcgatgcttcgaatattttgaagccggcattagcacgtggtgaattacaatgtattggtgctactacattagatgaatatcgcaaaaatattgaaaaagacgcggctttagaacgtcgtttccaacctgtacaagttgatgaaccttcagtagtagatacagttgctattttaaaaggattaagagatcgttacgaagcacaccatcgtattaatatttcagacgaagctattgaagcagctgttaaattaagtaacagatacgtttcagatcgtttcttaccagataaagcaattgatttaattgatgaagcaagttctaaagtaagacttaagagtcatacgacacctaataatttaaaagaaattgaacaagaaattgaaaaagttaaaaatgaaaaagatgccgcagtacatgctcaagagtttgaaaatgctgctaacctgcgtgataaacaaacaaaacttgaaaagcaatatgaagaagctaaaaatgaatggaagaatgcacaaaatggcatgtcaacttcattgtcagaagaagatattgctgaagttattgcaggatggacaggtatcccattaactaaaatcaatgaaacagaatctgaaaaacttcttagtctagaagatacattacatgagagagttattgggcaaaaagatgctgttaattcaatcagtaaagcggttagacgtgcccgtgcagggttaaaagatcctaaacgaccaattggtagctttatcttccttggaccaactggtgttggtaaaactgaattagctagagctttagctgaatcaatgtttggcgatgatgatgcgatgatccgtgtagacatgagtgaatttatggaaaaacacgcagtgagccgattagttggtgctcctccaggatatgttggtcatgatgatggtggacaattaactgaaaaagttagacgtaaaccatattctgtaattttatttgatgaaattgaaaaagctcatccagatgtatttaatattctattacaagttttagatgatggacatttgacagatacaaaaggacgtacagttgatttcagaaatacaattatcataatgacatcaaacgttggggcacaagaattacaagatcaacgatttgctggattcggtggttcaagtgatggacaagattatgaaacaattcgaaaaacgatgttaaaagaattaaaaaattcattccgtccagaatttttaaaccgtgtagatgatatcattgtattccataaactaacaaaagaagaattaaaagaaattgtaacaatgatggttaataaattaacaaatcgattatctgaacaaaacataaatattattgtaactgataaagcgaaagacaaaatcgcagaagaaggatatgatccagaatatggtgcaagaccattaattagagcgatacaaaaaactatcgaagataatttaagtgaattaatattagatggtaatcaaattgaaggtaagaaagttacagtagatcatgatggtaaagagtttaaatatgacattgctgaacaaacttcagaaactaaaacaccatcgcaagcataattataaaacagtccaaaacaaattaaagttttgggctgtttttttagtagcattgaactatagaaattcgtgaaagtatccatcaacgaaacaatctaataaaacaatcatcaaaggatagttaagaattatatgtaacaagttaatgagcctacagcgatagcataaaggtatgaatttttataaaggttttttgtttgaagatactagcaacttacgtcaaaataaaataggtctatataatattgtgataaatctagagaaaagagtttactaagaaattattaagattttatctttgaaagataccgactatcaacatgatgtaagtttattttataatattcataaaaaataaatctggtaaaacagtttgcgttagtagtcatgttaaaatacaaacaaatgtaactcacatttaatttgtcataatgggaatgtgcgtttaaaatagatttgttcaaaggaaagtggaggtgcaattttggccaagaaaaaagtgatttttgaatgtatggcttgtggttatcaatctcctaaatggatggggaaatgtcctaattgtggcgcttggaatcaaatggaggaaattgttgaaaaagcagccaatcctaaacatggagttaaaaccaaggaattagcaggtaaagtacaaaaattaaatagtattaaacatgaaacaacgccgagagtgttaacagattcagcagaattcaaccgtgtattaggtggaggtattgtgagcggatcgttagtacttattggtggggatccaggtattggtaagtcaacgttacttttacaaatttgtgcatcgttatctcaaaagaaaaaagtactatatattactggagaagaatcgcttagtcagactaaattacgtgcagagcgattagatgaagattcaagtgaattgcaagtattagctgaaacagatcttgaagttatttatcaaacagtaaaagaagaacaacctgatttattagtagtggattcgattcaaacaatatatcatcctgaaatcagctctgcgccaggttctgtttcacaagttcgtgaaagtacacaaagtttaatgaatattgctaaacaaatgaacattgcaacttttatagtgggtcatgtaacgaaagaaggtcaaattgctggcccaagattgctagaacacatggttgatactgtgctttattttgaaggcgatgaacaccacgcatatcgaattttgcgagctgttaaaaaccgttttggttcaacgaatgaaatgggaatcttcgaaatgaagcaaagtggattaaaaggtgtaaataatccatctgaaatgtttttagaagaacgttcaacaaatgttccaggttcaacaattgttgcaaccatggagggaaccagaccacttttaatagaagttcaagcgctggtaactccaacgacttttaacaatccgagacgaatggcaacagggattgatcataatcgattaagtttgttgatggctgttttggaaaagaaagaaaattatctattacaacaacaagatgcttatatcaaagtagctggcggtgtaaagttaacggagccagcagttgatttaagtgtaattgtagcaactgcatctagctttaaagataaagctgtcgacggattagattgctatattggagaagttggtttaacgggtgaggtacgtcgtgtatctcggatagaacaacgcgtgcaagaggctgcaaaactaggtttcaaacgtgtaattattcctaaaaataatataggcggatggacatatcctgaaggtatacaagtaataggtgtaactactgtacatgaagtattgtcatttgctcttcattcataaaacatcaagaaaggaggacattgtgtgaatatcgttaaactaatggttattattatttacttaattattgggagcgcattaggaataattattattcctgaaattgcaaatgatcttggattacaaaactccagctttttaaaaaatcactatgtagatggcattatcggtagtatttttatgttcttaatttttggtgtatttattagacgagttactaacgctataaaaggtttagaacattttattatgcgtagaagtgctgttgaaatactattcgcaacaataggtttaataatcggattacttatttctgttatggtgtcgtttatattagaatcaattggcaactctatttttaatcatttcattcctgtcataattacgatattactatgttatttcggtttccaatttggccttaaaaaacgagatgaaatgttaatgtttttacctgagaatatagcgcgttccatgtcacaacatactaaaagtgctacgccaaaaattatcgacacaagcgcaattattgatggtcgtattttagaagtcattcgttgcggttttatcgatggcaatattttaattccacaaggtgttattaatgaattacaaattgttgcagattcaaatgacagtgttaaacgtgaaaagggtaaaagaggcttagatattttaaatgaattgtatgatttagactatcctacaaaggttatacatccaactaaaacacatagtgatattgatacgatgttattaaaattagcaaaacaatatcatgcaagtattataacgacagatttcaacctaaataaagtttgtcatgtacatggtatcaaagcattaaatgttaatgatttatcagaagcaatcaaacctaatgtacatcaaggtgatcaactgcatattttactgacaaaaatgggtaaggagcctggtcaggcagtaggatatctagatgatggtacgatggtagttgttgataatgctaaaaatcttattggcagtcatgtcaatttagaagtagtcagcttattgcaaacatcttcaggaagaattgtttttgctaaaaaaatcgaagatacagtatcattataaaaactgtagttgacgaaaacaaaatagatattaaaaggtatatgaaatggcgaagtttgtaatttgaagtataactataaataaatgcaaaacatattagttatcaaaaaatacaaatagtgctaatatatcattgaaacaagttcattaagtgttaaattttagatattaataaagttattcttatagcaatcaagacatacaaaattagaatcaattttaacgtatttgaatagttaatttgaagtttaatttcacagtacataatattcatttttaagtcgttgaaatgtttatgtagtgcagtcttgattcttagggatagcttttttaaagtgttgaaaaaacaacagctttctatttaaaatttaagcatattacccagggaattatgttatgattaaacaatgaaattattttaaggtcatgttaaaaagcattgtttcgttttaacaataagacgagttagacatttgttatgacggtcgaagatagcaaatgaacaatttatatgaactaacttgaaaatctgatatttaatttaggagtgaaaaaaatgagcgatcgtataagagtaagatatgcaccaagtccaactgggtatcttcatattggtaatgcaagaacagcattattcaattacttgtatgctaaacattacaacggagattttgtgattcgaattgaagatactgataaaaaacgtaatttagaagatggagaaacatcacaatttgataatcttaaatggttaggattagattgggatgagtctgtagataaagacaatggctacggaccatatcgtcaatctgaacgtcaacatatctaccaaccattaatagatcagttactagcagaagataaagcatataaatgctatatgacagaagaagaattagaagctgaacgtgaagcgcaaatcgctcgtggtgaaatgcctcgctatggtggtcaacatgcgcatttgactgaagaacaacgtcaacaatttgaagcagaaggacgccaaccatcaattcgtttccgagtacctcaaaaccaaacgtattcatttgatgatatggtaaaaggaaatatttcatttgattcaaatggtattggtgactgggttatcgtaaaaaaagatggcattccaacgtacaattttgcagtagctatagatgatcattacatgcaaatttcagatgtaattcgtggtgatgatcatatttcaaacacgcctaaacaaattatgatttatgaagcatttggctgggagccacctcgttttggtcatatgtcattaattgttaatgaagaacgtaaaaagttaagtaaacgtgatgggcaaattttacaatttattgagcaatatcgtgacttaggttatttacctgaagcgttatttaattttattgcgttattaggttggtctcctgaaggtgaagaagaaatcttttctaaagaagaatttatcaaaatctttgatgaaaagcgtttgtcaaaatcaccagcatttttcgataagcaaaaattagcatgggttaataaccaatatatgaaacaaaaagatactgaaacagtattccaattagcattacctcatttaattaaagcaaatttgattcctgaggtgccgtcagaagaggatttatcttggggacgcaaattaattgcgctttatcaaaaagaaatgagttatgccggtgaaattgtacctttatcagaaatgttctttaaagaaatgccagctcttggtgaagaagaacaacaagtgattaatggagagcaagtaccagagttaatgacgcacttattcagtaaattagaagcacttgaaccatttgaagcggctgaaattaaaaagacaattaaagaagttcaaaaagaaacaggaataaaaggcaagcaattatttatgcctattcgtgttgctgtaacaggccaaatgcatggtcctgaattaccaaatacaattgaagtacttggtaaagaaaaagtgctaaaccgtttaaaacaatataagtaatgaaatagacaagatcaaggtagtatatacttgaattttataacgtaaccacatatgataaagttgtattaacaaattacaacaatatgaataaagtattttatataaaacgaaggattagtaattaaatttatacgatgcagagagtgtacggttgctgtgagtacaacgtagaaattaatgaatgcaccttcgtaaaatgaattaaatatataatgagagtgatgagcattaagttgacttagtttccttgataatttggaagcgcccgcaatattattaatgttattcgctaaattcagagtggaaccgtgcggaagcgcctctaacaatacaatttgtatgttagtggtgcttttttgatatttaatttcgcaggtacttcaattatgtatttacgtagttcaatcattgaggaggaaatgatcttgttaaaaagaatgagagacgatataaaaatggtatttgagcaggatccagcggcacgttcaacattagaagtcattacaacgtatgcaggtttacatgcagtttggagtcatttgattgcacataagttatacaaccaaaaaaaatatgttgcagcacgcgcgatatctcaaatttcaagatttttcacaggtatagaaatccatccaggtgctaaaattggaaagcgtctatttatagatcatggtatgggcgttgtaataggagaaacatgtacaattggtgataatgtgacaatctatcaaggcgtgacacttggtgggacagggaaagaaagagggaaaagacacccagatataggagacaatgttttaatagcagccggtgcgaaagttttaggaaatattaaaataaattcaaatgtaaatattggtgcaaattcagttgttttacaatcagttccaagttattcaacggttgttggtataccaggacatattgttaagcaagatggtgttcgagttggaaaaacatttgatcatcgccatctacctgatccaatttatgaacaaattaagcatttagaacgacaacttgaaaagactaggaatggagagattcaagatgattacattatataatacgcttacacgtcaaaaagaagtgttcaagcctatagaaccagggaaagtaaaaatgtatgtatgtggtcctactgtatataactacattcatattggtaacgcaagaccagcaattaattatgacgtagtgagacgttactttgaataccaaggatataatgtagaatatgtatcaaattttacagacgtagatgataaattaattaaacgttctcaagaattaaatcagtctgttcccgaaattgcagaaaaatatatcgctgcttttcatgaagatgttggtgcgttaaatgttagaaaagcgacttcaaatccaagggtaatggaccatatggatgacattattcaatttattaaagatttggtggatcaaggttatgcatatgaaagtggtggcgatgtttactttagaacacgtaaatttgaaggttatggtaaattaagtcatcaatccatagatgacttaaaagtgggtgctcgtatagatgcaggagagcataaagaagatgcacttgattttacattgtggaaaaaagcgaagcctggcgagattagttgggatagcccatttggtgaaggtagaccaggatggcatatagaatgttctgtaatggcatttcatgagctaggacctacaattgatatacatgcgggtggttcagatttacaatttccacatcatgaaaatgaaatagcacaatcagaagcacataatcatgcgccatttgctaattattggatgcataatggtttcattaatattgataatgaaaaaatgagtaaatcactaggcaactttattttagttcacgatattattaaagaagttgatccagatgtactaagattctttatgattagcgtacattatagaagcccaattaactataatctagaattggtagaatcagcacgtagtggactagagcgtattcgcaatagttatcaattaattgaagagcgcgcacaaattgctactaatattgaaaatcaacagacatatattgatcaaattgatgcgattttaaatcgttttgaaacagttatgaatgatgattttaatacagctaatgcaattacagcttggtatgatttagcaaaacttgcgaataaatatgtactagagaacacaacatcaacagaagtaattgataaatttaaagcagtttatcaaattttcagcgatgttttaggtgtaccgttaaaatctaaaaatgcagatgaattattggatgaagatgttgaaaaattaatcgaagagcgtaatgaagcaaggaaaaacaaagattttgcacgagcagatgaaattcgagacatgctgaaatcacaaaacattatattagaagacacacctcaaggggttagatttaaacgtggataatcaacaagataatcacattaaattattgaatccattgaccttagcatatatgggagacgcagtcttagatcaatatgtacgtacctatatcgttttaaagcttaaaagtaagcctaataaactacatcaaatgtctaaaaaatatgtatctgccaaaagtcaggcgcaaacgttagaatatttaatggagcaagaatggtttacagacgaagaaatggatattttgaagcgagggcgtaacgcgaaaagtcatactaaagctaaaaacactgatgttcaaacatatcgtaaaagttcagcgatagaagcagtgataggttttctttatttagaaaaaagagaagaacgattagaggcattattaaataaaataataacaatagtaaacgaaaggtagtgacgatgtggaagatacggttattgttggtaggcatgctgttagagaagcgattattactgggcatccgataaataagatattgattcaagaaggtattaaaaagcaacaaattaatgaaattttaaaaaatgcaaaagatcaaaaaatcattgttcaaactgtaccaaaatctaaattagattttttagcaaatgcaccacatcagggtgttgcagcgcttattgcaccatatgaatatgctgacttcgatcaatttttaaaacagcaaaaagaaaaagaaggtttattgacagtacttatattagacggcttagaagacccacataacttgggatcaattttaagaacagccgatgcaacgggagttgatggtgttattattcctaaacgtcgttcagttacactaacgcaaacagttgcaaaagcctcaacaggtgcaattgaacatgtaccagttattcgagtgacaaatttagctaaaactatcgatgaactaaaagataatggcttttgggtagctggcactgaagctaataatgcaacagattatagaaatctagaagcggacatgtcattggctattgtaattggtagcgaaggacagggtatgagtcgcctagtaagtgataaatgcgatttttatattaagattccaatggttggacatgtaaacagtttgaatgcttcggttgcagcaagtttaatgatgtacgaagtatttcgaaaaagacatgatgttggagaaatataatgaaagaacgttacttaatcattgatggatacaatatgataggacaatcaccaacgctaagcgccattgcaaaagagaatttagaagaagctagaatgcaattaatagatgcaattgcaaattataatgcagttatttcagatgaaattatttgtgttttcgatgcttatgaccaatcgggtgttgaaagagaatacatgtatcatggcgttaaaacgatttttaccaaggaaaaagaaacagctgatagtttcatagaacgttatgtttatgaactttatgacaagcatactaagcatattacagttgtaacaagtgatatgagtgagcaacatgctatctttggatcaggtgcatatagaatatcatctcgcgaaatgtggagagatttaaaagaaaatgaaattgatgtgagtaaatcattagatgatataagtgaaaacaagccaagaactcgaattccgttatcttctgaaatccttgcagaatttgaaaaaatacgaagaggacatcataagaaatgacatttccgtcatcttgaaattttgaatgtaacaatattaaactaaccttaaattttagatagaaggggttagtttaatatttgaaatacgatttgacaactcaagacagtacaatcaaacgtaacaatgcaataaatgataaagacttcgaaaagttagtaatggatctacaaccattaattattcgacgcatcaaaacatttggatttaatcattatgatttagaagacttatatcaagaaatacttatacggatgtataggtcggtccaaacatttgattttagtggagagcagcctttcacaaattatgttcaatgtttaattacgtctgtaaagtatgattatttgagaaaatatttagctacaaataaaagaatggataatttgattaatgaatatagagttacgtatccatgtgcaataaagcgttttgatgttgaaaacaattatttgaataaattagcaattaaagagttgatttgtcagtttaagtatttgagtgcatttgaaaaagatgtcatgtatttaatgtgtgaacaatataagccgagagaaattgctcaattgatgcatgtaaaagagaaagtgatttataatgccatacaacgatgtaaaaataaaataaaacgttatttcaaaatgatttgaaaagcgccttaggacgtgaattgaattataacgtgttacttactgatggtttgacatttgttataaattttatgtatagtatactggtattataatgaataaaggtgaattattgtgagaaaaatacctttaaattgtgaagcttgtggcaatagaaattataatgttcctaagcaagaaggctcggcaacaagattaaccttaaagaaatattgtccaaaatgtaacgcgcacacaattcataaagaatcgaaataaatacattcgaaataatactttgataatatgttcaaaggatttggaggttgagcagatggctaaaaaagaaagtttctttaaaggcgttaagtctgaaatggaaaaaacaagttggccgacgaaagaagagctatttaaatatactgtaattgtagtttctactgttatattcttcttagtctttttctatgccttagatttaggaattacagcattgaaaaatttattatttggttagaggagtgaagacatgtctgaagaagttggcgcaaagcgttggtatgcagtgcatacatattctggatatgaaaataaagttaaaaagaatttagaaaaaagagtagaatctatgaatatgactgaacaaatctttagagtagtcataccggaagaagaagaaactcaagtaaaagatggcaaagctaaaacgactgttaaaaaaacattccctggatatgttttagtggaattaatcatgacagatgaatcatggtatgtggtaagaaatacaccaggcgttactggttttgtaggttctgcaggtgcagggtctaagccaaatccattgttaccagaagaagttcgcttcatcttaaaacaaatgggtcttaaagaaaagactatcgatgttgaactcgaagttggcgagcaagttcgtattaaatcaggtccatttgcgaatcaagttggtgaagttcaagaaattgaaacagataagtttaagctaacagtattagtagatatgtttggccgagaaacaccagtagaagttgaattcgatcaaatagaaaagctttaattaacaattaaagttattaaactaaccaaaagataaaaaagagtattgattttttaattagaaaagtgttaaaattatgtggtcgcgcttttagagcgcccatttcgtcacgaaatgttaagagtgggagggcaaaactgagccctgtgaccacatcacgatatcaaggaggtgcacatcgtggctaaaaaagtagataaagttgttaaattacaaattcctgcaggtaaagcgaatccagcaccaccagttggtccagcattaggtcaagcaggtgtgaacatcatgggattctgtaaagagttcaatgcacgtactcaagatcaagcaggtttaattattccggtagaaatcagtgtttatgaagatcgttcatttacatttattacaaaaactccaccggctccagtattacttaaaaaagcagctggtattgaaaaaggttcaggcgaaccaaacaaaactaaagttgctacagtaactaaagatcaagtacgcgaaattgctaacagcaaaatgcaagacttaaacgctgctgacgaagaagcagctatgcgtattatcgaaggtactgcacgtagtatgggtatcgttgtagaataattttacgaatattaaatttgattacatgatttaaacgatgaagcagataacagagataataatgatgaattataaatataatctgaatgactagattaatgattgatttattcataagattaattcttctgttgtctgctcttaacttgcatatagcaagtaatgtgggaggaaattccgctaaaaccactaaaggaggaactataaatggctaaaaaaggtaaaaagtatcaagaagcagctagtaaagttgaccgtactcagcactacagtgttgaagaagcaattaaattagctaaagaaacaagcattgctaactttgacgcttctgttgaagttgcattccgtttaggaattgatacacgtaaaaatgaccaacaaatccgtggtgcagttgtattaccaaacggaactggtaaatcacaaagtgtattagtattcgctaaaggtgacaaaattgctgaagctgaagcagcaggtgctgactatgtaggtgaagcagaatacgttcaaaaaatccaacaaggttggttcgacttcgatgtagtagttgctacaccagacatgatgggtgaagttggtaaattaggtcgtgtattaggaccaaaaggtttaatgccaaaccctaaaactggaactgtaacaatggatgttaaaaaagctgttgaagaaatcaaagctggtaaagtagaatatcgtgctgaaaaagctggtatcgtacatgcatcaattggtaaagtttcatttactgatgaacaattaattgaaaacttcaatactttacaagatgtattagctaaagctaaaccatcatctgctaaaggtacatacttcaaatctgttgctgtaactacaacaatgggtcctggagttaaaattgatactgcaagtttcaaataataaatgatataaacaattacaggctgaaagaaatatctttcagtctgtaaaaatatattgacaataagtaatttccaagttatattacttattgtgattattttacctaagacagtaggagttatttataacttaaaatttatcctgccgaggctaaaattgacttgaacgtgatgatctatgatctttcaagcactttttgccgtgggtagaaagtgctttttttattaattttaaaaaaagcaccaaaaatttaaatggaggtgtctgaatgtctgctatcattgaagctaaaaaacaactagttgatgaaattgctgaggtactatcaaattcagtttcaacagtaatcgttgactaccgtggattaacagtagctgaagttactgacttacgttcacaattacgtgaagctggtgttgagtataaagtatacaaaaacactatggtacgtcgtgcagctgaaaaagctggtatcgaaggcttagatgaattcttaacaggtcctactgctattgcaacttcaagtgaagatgctgtagctgcagcgaaagtaatttctggatttgctaaagatcatgaagcattagaaattaaatcaggcgttatggaaggcaatgttattacagcagaagaagttaaaactgttggttcattaccttcacacgatggtcttgtatctatgcttttatcagtattacaagctcctgtacgcaacttcgcttatgcggttaaagctattggagaacaaaaagaagaaaacgctgaataatttttagcgtaaaaaaattaaaaataatggaggaattataaaatggctaatcatgaacaaatcattgaagcgattaaagaaatgtcagtattagaattaaacgacttagtaaaagcaattgaagaagaatttggtgtaactgcagctgctccagtagcagtagcaggtgcagctggtggcgctgacgctgcagcagaaaaaactgaatttgacgttgagttaacttcagctggttcatctaaaatcaaagttgttaaagctgttaaagaagcaactggtttaggattaaaagatgctaaagaattagtagacggagctcctaaagtaatcaaagaagctttacctaaagaagaagctgaaaaacttaaagaacaattagaagaagttggagctactgtagaattaaaataattcaagtatcttaaacttaataatcaaagttttatagcaagtattgctataatataatgattctttgagaagttaaaaccccgttattttgataacggggttttattcatttaaagactgagtgaaatgttataattataatgacgagttacaaagtgaagatgaggtggaataatgagtcattattacgatgaagatccaagtgtaattagcaatgaacaacgtattcaatatcaattaaaccatcataaaattgatttaataactgataacggagtgttttcgaaagataaagtagattatggttcagatgttcttgttcaaacttttttaaaagcgcatccacctggtccaagtaagcgaattgccgatgttggttgtggttacggaccaattggtttgatgattgctaaagtatcaccacatcattcaattacaatgctagatgttaatcacagagcgctagccttagttgaaaaaaacaaaaaattaaatggtattgataatgtgatcgtaaaggaaagtgatgctttgtctgctgtggaagacaaaagttttgattttattttaaccaatccaccaataagagcagggaaagaaaccgtgcatcgtatattcgagcaagcattacatagattagactcgaacggtgaactattcgttgtaattcagaagaagcaaggtatgccatctgcaaagaaaagaatgaatgaactttttggaaatgtagaagtggtaaataaagataaaggatattacattctgagaagtataaaagcttgaaatgaaatggatattctgttatagttatataatgtaaaaatttatgttcaataagtgtgtacttttacgttaaatagataagttaattaagaataaatatagaatcgaaaatggtgtcatcattagtgttgccgttttctttttgtctttttattaatatgcttatggtatttagctaaaagcggatcacataatttttgaggggtgaatctgtttggcaggtcaagttgtccaatatggaagacatcgtaaacgtagaaactacgcgagaatttcagaagtattagaattaccaaacttaatagaaattcaaactaaatcttacgagtggttcctaagagaaggtttaatcgaaatgtttagagacatttctccaattgaagattttactggtaatttgtcattagagtttgtggattaccgtttaggagaaccaaaatatgatttagaagaatctaaaaaccgtgacgctacttatgctgcacctcttcgtgtaaaagtgcgtctaatcattaaagaaacaggagaagttaaagaacaagaagtctttatgggtgatttcccattaatgactgatacaggtacgttcgttatcaatggtgcagaacgtgtaatcgtatctcaattagttcgttcaccatccgtttatttcaatgaaaaaatcgacaaaaatggtcgtgaaaactatgatgcaacaattattccaaaccgtggtgcatggttagaatatgaaacagatgctaaagatgttgtatacgtacgtattgatagaacacgtaaactaccattaacagtattgttacgtgcattaggtttctcaagcgaccaagaaattgttgaccttttaggtgacaatgaatatttacgtaatactttagagaaagacggcactgaaaacactgaacaagcgttattagaaatctatgaacgtttacgtccaggtgaaccaccaactgttgaaaatgctaaaagtctattgtattcacgtttctttgatccaaaacgctatgacttagcaagcgtgggtcgttataaaacaaacaaaaaattacatttaaaacatcgtttatttaatcaaaaattagctgagccaattgtaaatactgaaactggtgaaattgtagttgaagaaggtacagtgcttgatcgtcgtaaaatcgacgaaatcatggatgtacttgaatcaaatgcaaacagcgaagtgtttgaattgcatggtagcgttatagacgagccagtagaaattcaatcaattaaagtatatgttcctaacgatgatgaaggtcgtacgacaactgtaattggtaatgctttccctgactcagaagttaaatgcattacaccagcagatatcattgcttcaatgagttacttctttaacttattaagcggtattggatatacagatgatattgaccatttaggtaaccgtcgtttacgttctgtaggtgaattactacaaaaccaattccgtatcggtttatcaagaatggaaagagttgtacgtgaaagaatgtcaattcaagatactgagtctatcacacctcaacaattaattaatattcgacctgttattgcatctattaaagaattctttggtagctctcaattatcacaattcatggaccaagcaaacccattagctgagttaacgcataaacgtcgtctatcagcattaggacctggtggtttaacacgtgaacgtgctcaaatggaagtacgtgacgttcactactctcactatggccgtatgtgtccaattgaaacacctgagggaccaaacattggattgattaactcattatcaagttatgcacgtgtaaatgaattcggctttattgaaacaccatatcgtaaagttgatttagatacacatgctatcactgatcaaattgactatttaacagctgacgaagaagatagctatgttgtagcacaagcaaactctaaattagatgaaaatggtcgtttcatggatgatgaagttgtatgtcgtttccgtggtaacaatacagttatggctaaagaaaaaatggattatatggatgtatcgccgaagcaagttgtttcagcagcgacagcatgtattccattcttagaaaatgatgactcaaaccgtgcattgatgggtgcgaacatgcaacgtcaagcagtgcctttgatgaatccagaagcaccatttgttggtacaggtatggaacacgttgcagcacgtgattctggtgcggctattacagctaagcacagaggtcgtgttgaacatgttgaatctaatgaaattcttgttcgtcgtctagttgaagagaacggcgttgagcatgaaggtgaattagatcgctatccattagctaaatttaaacgttcaaactcaggtacatgttacaaccaacgtccaatcgttgcagttggagatgttgttgagtataacgagattttagcagatggaccatctatggaattaggagaaatggcattaggtagaaacgtagtagttggtttcatgacttgggacggttacaactatgaggatgccgttatcatgagtgaaagacttgtgaaagatgacgtgtatacttctattcatattgaagagtatgaatcagaagcacgtgatactaagttaggacctgaagaaatcacaagagatattcctaatgtttctgaaagtgcacttaagaacttagacgatcgtggtatcgtttatattggtgcagaagtaaaagatggagatattttagttggtaaagtaacgcctaaaggtgtaactgagttaactgccgaagaaagattgttacatgcaatctttggtgaaaaagcacgtgaagttagagatacttcattacgtgtacctcacggcgctggcggtatcgttcttgatgtaaaagtattcaatcgtgaagaaggcgacgatacattatcacctggtgtaaaccaattagtacgtgtatatatcgttcaaaaacgtaaaattcatgttggtgataagatgtgtggtcgacatggtaacaaaggtgtcatttctaagattgttcctgaagaagatatgccttacttaccagatggacgtccgatcgatatcatgttaaatcctcttggtgtaccatctcgtatgaacatcggacaagtattagagctacacttaggtatggctgctaaaaatcttggtattcacgttgcatcaccagtatttgacggtgcaaacgatgacgatgtatggtcaacaattgaagaagctggtatggctcgtgatggtaaaactgtactttatgatggacgtacaggtgaaccattcgataaccgtatttcagtaggtgtaatgtacatgttgaaacttgcgcacatggttgatgataaattacatgcgcgttcaacaggaccatattcacttgttacacaacaaccacttggcggtaaagcgcaattcggtggacaacgttttggtgagatggaggtatgggcacttgaagcatatggtgctgcatacacattacaagaaatcttaacttacaaatccgatgatacagtaggacgtgtgaaaacatacgaggctattgttaaaggtgaaaacatctctagaccaagtgttccagaatcattccgagtattgatgaaagaattacaaagtttaggtttagatgtaaaagttatggatgagcaagataatgaaatcgaaatgacagacgttgatgacgatgatgttgtagaacgcaaagtagatttacaacaaaatgatgctcctgaaacacaaaaagaagttactgattaatacgcaatttacaaaacaggcaaaaagatactaagctgaattttattgatgattcagtttagtactttaagccattttaaataaatgcaaatcaatcaaatagcacagctaatctaaattgaaggaggtaggctccttgattgatgtaaataatttccattatatgaaaataggattggcttcacctgaaaaaatccgttcttggtcttttggtgaagttaaaaaacctgaaacaatcaactaccgtacattaaaacctgaaaaagatggtctattctgtgaaagaattttcggacctacaaaagactgggaatgtagttgtggtaaatacaaacgtgttcgctacaaaggcatggtctgtgacagatgtggagttgaagtaactaaatctaaagtacgtcgtgaaagaatgggtcacattgaacttgctgctccagtttctcacatttggtatttcaaaggtataccaagtcgtatgggattattacttgacatgtcaccaagagcattagaagaagttatttactttgcttcttatgttgttgtagatccaggtccaactggtttagaaaagaaaactttattatctgaagctgaattcagagattattatgataaatacccaggtcaattcgttgcaaaaatgggtgcagaaggtattaaagatttacttgaagagattgatcttgacgaagaacttaaattgttacgcgatgagttggaatcagctactggtcaaagacttactcgtgcaattaaacgtttagaagttgttgaatcattccgtaattcaggtaacaaaccttcatggatgattttagatgtacttccaatcatcccaccagaaattcgtccaatggttcaattagatggtggacgatttgcaacaagtgacttaaacgacttataccgtcgtgtaattaatcgaaataatcgtttgaaacgtttattagatttaggtgcacctggtatcatcgttcaaaacgaaaaacgtatgttacaagaagccgttgacgctttaattgataatggtcgtcgtggtcgtccagttactggcccaggtaaccgtccattaaaatctttatctcatatgttaaaaggtaaacaaggtcgtttccgtcaaaacttacttggtaaacgtgttgactattcaggacgttcagttattgcagtaggtccaagcttgaaaatgtaccaatgtggtttaccaaaagaaatggcacttgaactatttaaaccattcgtaatgaaagaattagttcaacgtgaaattgcaactaacattaaaaatgcgaagagtaaaatcgaacgtatggatgatgaagtttgggacgtattggaagaagtaattagagaacatcctgtattacttaaccgtgcaccaacacttcatagacttggtattcaagcatttgaaccaactttagttgaaggtcgtgcgattcgtctacatccacttgtaacaacagcttataacgctgactttgacggtgaccaaatggcggttcacgttcctttatcaaaagaggcacaagctgaagcaagaatgttgatgttagcagcacaaaacatcttgaaccctaaagatggtaaacctgtagttacaccatcacaagatatggtacttggtaactattaccttactttagaaagaaaagatgcagtaaatacaggcgcaatctttaataatacaaatgaagtattaaaagcatatgcaaatggctttgtacatttacacactagaattggtgtacatgcaagttcgttcaataatccaacatttactgaagaacaaaacaaaaagattcttgctacgtcagtaggtaaaattatattcaatgaaatcattccagattcatttgcttatattaatgaacctacgcaagaaaacttagaaagaaagacaccaaacagatatttcatcgatcctacaactttaggtgaaggtggattaaaagaatactttgaaaatgaagaattaattgaacctttcaacaaaaaattcttaggtaatattattgcagaagtattcaacagatttagcatcactgatacatcaatgatgttagaccgtatgaaagacttaggattcaaattctcatctaaagctggtattacagtaggtgttgctgatatcgtagtattacctgataagcaacaaatacttgatgagcatgaaaaattagtcgacagaattacaaaacaattcaaccgtggtttaatcactgaagaagaaagatataatgcagttgttgaaatttggacagatgcaaaagatcaaattcaaggtgaattgatgcaatcacttgataaaactaacccaatcttcatgatgagtgattcaggtgcccgtggtaacgcatctaactttacacagttagcaggtatgcgtggattgatggccgcaccatctggtaagattatcgaattaccaatcacatcttcattccgtgaaggtttaacagtacttgaatacttcatctcaactcacggtgcacgtaaaggtcttgccgatacagcacttaaaacagctgactcaggatatcttactcgtcgtcttgttgacgtggcacaagatgttattgttcgtgaagaagactgtggtactgatagaggtttattagtttctgatattaaagaaggtacagaaatgattgaaccatttatcgaacgtattgaaggtcgttattctaaagaaacaattcgtcatcctgaaactgatgaaataatcattcgtcctgatgaattaattacacctgaaattgctaagaaaattacagatgctggtattgaacaaatgtatattcgctcagcatttacttgtaacgcacgacatggtgtttgtgaaaaatgttacggtaaaaaccttgctactggtgaaaaagttgaagttggtgaagcagttggtacaattgcagcccaatctatcggtgaaccaggtacacagcttacaatgcgtacattccatacaggtggggtagcaggtagcgatatcacacaaggtcttcctcgtattcaagagattttcgaagcacgtaaccctaaaggtcaagcggtaattacggaaatcgaaggtgtcgtagaagatattaaattagcaaaagatagacaacaagaaattgttgttaaaggtgctaatgaaacaagatcataccttgcttcaggtacttcaagaattattgtagaaatcggtcaaccagttcaacgtggtgaagtattaactgaaggttctattgaacctaagaattacttatctgttgctggattaaacgcgactgaaagctacttattaaaagaagtacaaaaagtttaccgtatgcaaggtgtagaaatcgacgataaacacgttgaggttatggttcgacaaatgttacgtaaagttagaattatcgaagcaggtgatacgaagttattaccaggttcattagttgatattcataactttacagatgcaaatagagaagcatttaaacaccgtaagcgtcctgcaacagctaaaccagtattacttggtattactaaagcatcacttgaaacagaaagtttcttatctgcagcatcattccaagaaacaacaagagttcttacagatgcagcaattaaaggtaagcgtgatgacttattaggtcttaaagaaaacgtaattattggtaagttaattccagctggtactggtatgagacgttatagcgacgtaaaatacgaaaaaacagctaaaccagttgcagaagttgaatctcaaactgaagtaacggaataacaagtatataacagaggctaatgctttagcctcttgttatttttatgtaaattatttgatttaatgttgacgaattctcttgttcaatgttaatatattaaaggttgatgcaagcagaactttggaggataaattattgtctaaggaaaaagttgcacgctttaacaaacaacattttgtagttggtcttaaagaaacgcttaaagcgttaaagaaagatcaagttacatctttgattattgctgaagacgttgaagtatatttaatgactcgcgtgttaagccaaatcaatcagaaaaatatacctgtatcttttttcaaaagcaaacatgctttgggtaaacatgtaggtattaacgtcaatgcgacaatagtagcattgattaaatgagaattagtaagtgttttacttactaaattttatttaacctaaaaatgaaccacctggatgtgtgggattaaaaagtgaagagaggaggacatatcacatgccaactattaaccaattagtacgtaaaccaagacaaagcaaaatcaaaaaatcagattctccagctttaaataaaggtttcaacagtaaaaagaaaaaatttactgacttaaactcaccacaaaaacgtggtgtatgtactcgtgtaggtacaatgacacctaaaaaacctaactcagcgttacgtaaatatgcacgtgtgcgtttatcaaacaacatcgaaattaacgcatacatccctggtatcggacataacttacaagaacacagtgttgtacttgtacgtggtggacgtgtaaaagacttaccaggtgtgcgttaccatattgtacgtggagcacttgatacttcaggtgttgacggacgtagacaaggtcgttcattatacggaactaagaaacctaaaaactaagaatttagtttttaattaaatcttaaacttaaaatatttaatataaggaagggaggatttacattatgcctcgtaaaggatcagtacctaaaagagacgtattaccagatccaattcataactctaagttagtaactaaattaattaacaaaattatgttagatggtaaacgtggaacagcacaaagaattctttattcagcattcgacctagttgaacaacgcagtggtcgtgatgcattagaagtattcgaagaagcaatcaacaacattatgccagtattagaagttaaagctcgtcgcgtaggtggttctaactatcaagtaccagtagaagttcgtccagagcgtcgtactactttaggtttacgttggttagttaactatgcacgtcttcgtggtgaaaaaacgatggaagatcgtttagctaacgaaattttagatgcagcaaataatacaggtggtgccgttaagaaacgtgaggacactcacaaaatggctgaagcaaacaaagcatttgctcactaccgttggtaagataaaagcttttaccctgagtgtgttctatattaatgaattttcattaagcgttcatgcttagggcatcgccatatctatcgtatttattcagtaatataaactggaaggagaaaaaatacatggctagagaattttcattagaaaaaactcgtaatatcggtatcatggctcacattgatgctggtaaaacgactacgactgaacgtattctttattacactggccgtatccacaaaattggtgaaacacacgaaggtgcttcacaaatggactggatggagcaagaacaagaccgtggtattactatcacatctgctgcaacaacagcagcttgggaaggtcaccgtgtaaacattatcgatacacctggacacgtagacttcactgtagaagttgaacgttcattacgtgtacttgacggagcagttacagtacttgatgcacaatcaggtgttgaacctcaaactgaaacagtttggcgtcaggctacaacttatggtgttccacgtatcgtatttgtaaacaaaatggacaaattaggtgctaacttcgaatactctgtaagtacattacatgatcgtttacaagctaacgctgctccaatccaattaccaattggtgcggaagacgaattcgaagcaatcattgacttagttgaaatgaaatgtttcaaatatacaaatgatttaggtactgaaattgaagaaattgaaattcctgaagaccacttagatagagctgaagaagctcgtgctagcttaatcgaagcagttgcagaaactagcgacgaattaatggaaaaatatcttggtgacgaagaaatttcagtttctgaattaaaagaagctatccgccaagctactactaacgtagaattctacccagtactttgtggtacagctttcaaaaacaaaggtgttcaattaatgcttgacgctgtaattgattacttaccttcaccactagacgttaaaccaattattggtcaccgtgctagcaaccctgaagaagaagtaatcgcgaaagcagacgattcagctgaattcgctgcattagcgttcaaagttatgactgacccttatgttggtaaattaacattcttccgtgtgtattcaggtacaatgacatctggttcatacgttaagaactctactaaaggtaaacgtgaacgtgtaggtcgtttattacaaatgcacgctaactcacgtcaagaaatcgatactgtatactctggagatatcgctgctgcggtaggtcttaaagatacaggtactggtgatactttatgtggtgagaaaaatgacattatcttggaatcaatggaattcccagagccagttattcacttatcagtagagccaaaatctaaagctgaccaagataaaatgactcaagctttagttaaattacaagaagaagacccaacattccatgcacacactgacgaagaaactggacaagttatcatcggtggtatgggtgagcttcacttagacatcttagtagaccgtatgaagaaagaattcaacgttgaatgtaacgtaggtgctccaatggtttcatatcgtgaaacattcaaatcatctgcacaagttcaaggtaaattctctcgtcaatctggtggtcgtggtcaatacggtgatgttcacattgaattcacaccaaacgaaacaggcgcaggtttcgaattcgaaaacgctatcgttggtggtgtagttcctcgtgaatacattccatcagtagaagctggtcttaaagatgctatggaaaatggtgttttagcaggttatcctttaattgatgttaaagctaaattatatgatggttcataccatgatgtcgattcatctgaaatggccttcaaaattgctgcatcattagcacttaaagaagctgctaaaaaatgtgatcctgtaatcttagaaccaatgatgaaagtaactattgaaatgcctgaagagtacatgggtgatatcatgggtgacgtaacatctcgtcgtggacgtgttgatggtatggaacctcgtggtaatgcacaagttgttaatgcttatgtaccactttcagaaatgttcggttatgcaacatcattacgttcaaacactcaaggtcgcggtacttacactatgtacttcgatcactatgctgaagttccaaaatcaatcgctgaagatattatcaagaaaaataaaggtgaataatataacttgttttgactagctagcctaggttaaaatacaaggtgagcttaaatgtaagctatcatctttatagtttgattttttggggtgaatgcattataaaagaattgtaaaattctttttgcatcgctataaataatttctcatgatggtgagaaactatcatgagagataaatttaaatattatttttaattagaataggagagattttataatggcaaaagaaaaattcgatcgttctaaagaacatgccaatatcggtactatcggtcacgttgaccatggtaaaacaacattaacagcagcaatcgctactgtattagcaaaaaatggtgactcagttgcacaatcatatgacatgattgacaacgctccagaagaaaaagaacgtggtatcacaatcaatacttctcacattgagtaccaaactgacaaacgtcactacgctcacgttgactgcccaggacacgctgactacgttaaaaacatgatcactggtgctgctcaaatggacggcggtatcttagtagtatctgctgctgacggtccaatgccacaaactcgtgaacacattcttttatcacgtaacgttggtgtaccagcattagtagtattcttaaacaaagttgacatggttgacgatgaagaattattagaattagtagaaatggaagttcgtgacttattaagcgaatatgacttcccaggtgacgatgtacctgtaatcgctggttcagcattaaaagctttagaaggcgatgctcaatacgaagaaaaaatcttagaattaatggaagctgtagatacttacattccaactccagaacgtgattctgacaaaccattcatgatgccagttgaggacgtattctcaatcactggtcgtggtactgttgctacaggccgtgttgaacgtggtcaaatcaaagttggtgaagaagttgaaatcatcggtttacatgacacatctaaaacaactgttacaggtgttgaaatgttccgtaaattattagactacgctgaagctggtgacaacattggtgcattattacgtggtgttgctcgtgaagacgtacaacgtggtcaagtattagctgctcctggttcaattacaccacatactgaattcaaagcagaagtatacgtattatcaaaagacgaaggtggacgtcacactccattcttctcaaactatcgtccacaattctatttccgtactactgacgtaactggtgttgttcacttaccagaaggtactgaaatggtaatgcctggtgataacgttgaaatgacagtagaattaatcgctccaatcgcgattgaagacggtactcgtttctcaatccgtgaaggtggacgtactgtaggatcaggcgttgttactgaaatcattaaataatttctaatttcttagattttatataaaaagaagatccctcaatcgaggggtctttttttaatgtgtaaattttgtaatggctattcgatttagaagaacaataattgatgaaagactgactaataaaacttataactgataatactgtttaaataaaattgttgagtcttggacattgtaaaatgctcccttcaaagttttcattttttcaatgtctactttgaagggagcatttcattagtttatgtctcagattcatatctttcaattaatttaaatgcttaatttgttttaaatacttgctctaattctatgatttttaaaaatacagctacagcgtattttaatgatttttcatcaatatcaaatttgggattatggtgtggcgctgtaatacctttactttcattaccacaaccagtcagaaagaatgcacctggtcgtactttcaaataatgtgaaaaatcttctccaatcatcattaaatctgattcattaaagcgtacatgtaagtcatttgttgcttctttaataacttgatatgctttctcgttattatggacaggcaaataccctttaatataattcaaatcatagttaatatcatttgctattgctaaaccttgtagaagcttatccattttgtccattacatgattctgtatatctgaatcgaaagttctaactgtacctttacaaaatgcttgatcaggaataacgctatctgtggtgcctgcttgaatcattccaaatgaaagtacagcttgtttaactggatcgatcgtacgtgaaattattttttgtgcacttaaaatgaactctgccatgattactattgggtcaatggtttcatgaggtttggcaccatgaccaccacgacctttaaatgtgacgctaaattcatctggagaggccatgattgcccccgcacgtgaatgaatagttccagtaggataaccactccataaatgtgtaccgtaaattctatctacattttccagacatccagcatctatcatttcttgagaaccacctggcatgatttcttcaccgtactggaatattaatacaacattaccttctaataaatgtttatgttcatctaaaatctctgctacagtaagtaaaattgctgtatgaccatcatgcccacacgcatgcatacatcctggatttttagacttataaggcacatcgtttaattcctcgacaggtaacgcatcaaagtcagctcttaatgcaatggtaggtcctgtgcccaagcctttaaatgtggctttgataccattgcggccgataggagtttcaatatcacaagataactggcttaattggttaacaatataatcatgtgtttgaaattcttcaaaagataactcaggatattggtgtaaataacgtctgagttgaattgttttattttctttattatttgctagttggaaccaatctaacacccttatcactactttctaaaataatgtttatagtataacattttatgaaattatcgtactaaatgattgctttgagatattttatctatgaatgataaggctttcaagttatgtagaattactgtatgataaaggtattaccaaacaatacttaagggggattatatactgtggttcaatcattacatgagtttttagaggaaaatataaattatctaaaagaaaatggtttgtataatgaaatagatacaattgaaggtgcaaacggaccagaaatcaaaatcaatgggaaatcatacattaacttatcttcaaataattatttaggactagcaacaaatgaagatttgaaatcagctgcaaaagcagctattgatacacatggtgtaggtgcaggcgctgttcgtacaatcaatggtacattagatttacacgacgaattagaagaaacactagcaaaatttaaaggaacagaagctgcaatagcttatcaatcaggatttaattgtaatatggctgctatttcagctgtcatgaataaaaatgatgctattttatcagatgagcttaatcatgcatcaattattgatggatgtcgcttatctaaagctaaaattattcgagttaaccattcagacatggatgatttacgtgcgaaagcaaaagaagcagttgaatcaggtcaatacaataaagtgatgtatatcactgatggcgtttttagtatggatggtgatgtggctaaattacctgaaattgtagaaattgcagaagaatttggtttattaacttatgttgacgacgctcatggttcaggtgttatgggtaaaggcgctggtacggttaaacattttggtttacaagataaaatcgatttccaaataggtacgctttctaaagcaattggtgtcgttggcggttatgtagcaggtacaaaagagttaatagattggttaaaagcacaatcacgaccattcttattctctacatcattagcacctggggataccaaagcaataactgaagcagttaaaaagttaatggattcaactgaattacatgataaattatggaacaatgcacaatatttaaaaaatggattgtcaaaattaggatatgatacaggtgagtcagaaactccaattacaccagtaattattggtgatgaaaaaacaactcaagaatttagtaagcgtttaaaagacgaaggtgtctatgtgaaatctatcgttttcccaacagtaccaagaggtacaggacgtgtaagaaatatgcctacagctgcacatacaaaagacatgttagatgaagcaattgcggcttatgaaaaagtaggaaaagaaatgaagttgatttaatatttatttattcccacggcaaatattgtcgtgggctttttttaatgtttagtttattaacagtaagttcgtatatcaatgtttagtgctccccaaaattgaagtttgaattttaaaagcatcttgtagaatttagttgtatttttttcaaagaaattcattttgattatttttgataatgagcattttaatagtaatacatgtttatagtgtgtagtatatgtctatactagtagtaactatatagagaaagtaggaataaactatgtcacaagatgtaaatgaattaagtaagcaaccaacgccagataaagcagaagataacgcatttttcccatcaccatattcccttagtcaatatacagcacctaaaacagattttgatggtgttgaacacaaaggtgcctataaagatggtaaatggaaagtattgatgattgctgctgaagagcgatatgtattattggaaaatggaaaaatgttctctacgggtaatcatcctgttgaaatgttattacctttacatcatttaatggaagcaggttttgacgttgatgttgcgacattatctggttatccagttaaattagaattatgggctatgccaactgaagacgaggcagttataagtacttataataaattgaaagaaaaattaaaacagccaaaaaaattagcagatgtgattaaaaatgaattaggacctgattcagactatttatctgtctttatcccaggcggacatgctgcagttgttggtatttctgaaagtgaggacgttcaacaaacattagattgggcattagacaatgaccgctttatagttacattatgtcatggaccagcagcactactttcagcagggcttaacagagaaaaatctccattagaaggatactctgtttgtgtcttccctgactcattagatgaaggtgcaaatattgaaataggttatttacctggacgcttgaaatggttagttgctgatttattaactaaacaaggattaaaagtagttaacgacgatatgacaggaagaacgttaaaagatcgtaaattattaacaggtgacagtcctttagcttcaaatgagttaggaaaattagcagttaatgaaatgttaaatgcaatacaaaataaataattaaatattaattagaggagcctcatatgtaaatgtatgagggctcttttttttggcaaaatttaagtgatacttgtaaaatagaacctattatgagtatgatttaagaaaacgcttgcaaaactaataaccgcaactagcgatatggaggaaacatgatgtcttatagcattggaattgattatggaactgcttcaggccgtgtgtttttaattaatacaactaacggtcaagtagtatcaaaatttgtgaaaccatatacacatggtgtcattgagagtgaattaaatggtttgaaaataccacatacatatgcacttcaaaatagtaatgattatttagaaattatggaagaaggaatatcatatatagtacgtgaatcaaaaatagatccagacaatatagtaggtattggtatagactttacttcatctactattatttttactgacgaaaaccttaacccggtacataacttaaaacaatttaaaaacaatccacatgcgtatgtgaaactttggaaacatcatggtgcatataaagaggcagagaaattatatcaaactgctattgaaaataataataagtggttaggccattatggatataatgttagtagtgaatggatgattcccaaaataatggaggtcatgaatcgagcaccagaaattatggaaaaaacggcttatattatggaagcgggcgattggattgtaaataaattaactaataaaaatgtacgctcgaattgtggattaggtttcaaagcattttgggaagaagaaacagggtttcattatgatttatttgataaaatagaccccaaattatcaaaagtaattcaagataaagtatctgcaccggttgttaatattggtgaagcagtagggaaactggatgataaaatggcacagaaattaggattatcaaaagaaactatggtaagtccttttattattgatgcccatgctagtttattaggtattgggtctgaaaaagataaagaaatgactatggtgatgggaacaagcacatgccatcttatgttaaatgaaaagcaacatcaagtgccaggtatatcaggttctgtaaaaggagcaattattccagaattatttgcttatgaagcggggcaatcagcagtaggtgatttgtttgagtatgtcgctaagcaagcaccaaagtcatatgtagatgaagcagaaaatagaaatatgactgtatttgaattaatgaatgaaaagataaaacatcaaatgccaggtgaaagtgggctcattgctcttgattggcataatggaaatcgaagtgtattaagtgatagcaatttaacaggttgtatctttggattaactttacaaactaagcatgaggatatttatagagcatatttagaagctacagcatttggtactaagatgattatgcaacagtatcaagattggcatatggaagtagaaaaggtatttgcatgtggcggtatacctaaaaagaatgctgttatgatggatatctatgcgaatgtactgaataaaaaactaattgttatggatagtgagtatgcaccagcaataggcgcagcaatattaggtgcagtcagtggtggcgcacataattcaattaatgacgcagttgatgctatgaaagagccaattttatacgaaattaatccagaagcggaaaaagtacaaaggtatgaaacattatttaaagcttataaggctttacatgatatccatggttataaaaaagctaatataatgaaagatatccagagtttaagagttgagggataaaaaatttaatttgacagtaattagcaataataaacgctataaattactaaaatcaattaatacaactagaatttccatttacagaaatatcagcaacatgtacatgtcatatatacaagaaagcgcttttatattataattattatgaaaatgaatattatgtccgcttgtgatggactatagctatatagaagagacaaaggagatatttctatgaaaaaaattatgattactggtgcattaggacaaattggtacagaattagttgttaagtgcagagaaatttatgggacagataatgttcttgctacagatattagggaacctgaagcagactcacctgtacaaaatggaccatttgaaatcttagacgtaacagatcgtgaccgtatgtttgagttagttagggactttgaagcggatagtctaatgcatatggcagcattattatcagcaactgctgagaaaaatccaattctagcttgggatttaaatatgggtggattaatgaatgcattagaagctgcaagaacttataatttgcactttttcacaccaagttcaattggtgcatttggagactcaactcctaaagttaatacgccacaagtaacgattcagcaacctacgacaatgtatggtgtaaataaagtagctggagaattattgtgtcaatactatttcaaacgttttggtgtagatacaagaagtgttagattcccaggtttaatctcgcatgttaaagagccaggtggcggtactacagactatgctgttgaaatatacttcaaagcagtaagagagggtcattatacaagcttcatagataaaggcacgtatatggatatgatgtatatggatgatgcaattgaagcaattattaaacttatggaagcagacgacgctaaattagaaactagaaatggttataatttgagcgcaatgagttttgatccagagatggtaaaagaagcaattcaagaatactatcccaattttacattagattacgatgttgatcctattagacaaggtatcgctaatagttggccggattctattgatacaagctgttcacgtggcgaatggggatttgatcctaaatatgatttagcgagcatgactaaattaatgttagaagctattgaacaaaaagatactgttaaaaataataactaatcatttccattcactttaatacacggaatgatattttaaattactctttattttaataaactagtgcatgaattctaatattattcattatacttattgaattcgcgagcttagttcattttaaagtaaagagttttttgtatgtaaagtatattagtaaaacacagattacttgtctctgtgaaattaatacgtttatactaaaagatatagtctttctagaaatctgttaattaattttgaatttttagaaaatttgttgaacagcaaaatatggattgttataatttaagttaaacaaattcttatacaatattattaggaggcaatcaccatgtcacaagcagttaaagttgaacgacgagaaacattaaaacaaaaaccaaatacatctcaactaggttttggtaaatattttactgattatatgttgagttatgattatgatgcagataaaggatggcatgatttgaagatagtaccttatggtcctattgaaatttcacctgctgcacaaggtgttcattatggtcaatcggtattcgaaggattaaaagcatataaaagagatggggaagttgcacttttccgtcctgaagaaaattttaagcgtcttaataactcgttagcacgattagaaatgcctcaagtagacgaagcagaattgttagaggggctaaaacaattagttgatattgaaagagattggattcctgaaggggaaggtcaatcattatatattcgtccatttgtttttgcaacagaaggggcacttggcgttggtgcatcacatcagtataaattattaattattttatctccttcaggtgcatattatggtggtgaaactttaaaaccaactaaaatctatgtagaagatgaatatgtgcgtgctgttcgtggcggtgtaggctttgcaaaagttgcaggtaactatgcggcaagtttattagcacaaactaatgcaaataaattaggttatgaccaagtattatggcttgatggtgttgaacagaaatatatcgaagaagttggtagcatgaacattttcttcgttgaaaatggcaaagtaattacaccagagttgaatggcagtattttacctggtattacacgtaaatctattatcgaattagctaaaaacttaggatatgaagtcgaagagcgccgcgtttcaatcgatgaattattcgaatcatatgataaaggtgagttaacagaagtatttggtagtggtactgcagcagttatttcacctgtgggtacattgagatacgaagatcgtgaaatcgttattaataataatgagactggtgaaattactcaaaaattatacgacgtctatactggtattcaaaatggtactttagaagataaaaatggttggagagtcgttgtaccaaaatattaataaaaattgaatataatcatgaaaacaatatgcaaaagttaatcatgactaaaatccctttcaatgaagcgaagcatggtaataaattaagtttacaatgtttattgttaagtattgaaggggatttcacttattattatatttaattcaatatttaaatagaacaatactacgagttcattttcaggggataacgaatatcatagaatcagcataatacgaaataaataaataggagtattgatatcaatggaatggatattatttgataaagatggtacgttaattgaatttgatagaagttgggaaaaaataggggtacgatttgtacaatcattgcttgagactttcccagtacataataaagaagctgctttaagacaactcggtgtcattaaagaatctattgatccaaaatcagtgatgggttcaggatctttacaacaaattatccaggcatttaatgatgtgacgggacaagatacaaccgactggtccaagtcaacaagtcaaaagctggtagatgaacgtattcctgaaattaattgggtagaaggtgttaaagaagcacttatcgatttgaaagcaaaaggctatcaacttggtattgttacgagtgatactaaaaaaggtgtagaacaatttttagcacataccaatgctacctcgttgttcgatttgatcatttctaccgaagcggatgcctatgagaagccaaatcctaaagtattatcgcctttatttgagcaatataatgtagatcctcagaaagtagctatagtaggagacactgctaatgatatgaagacagcaagtaatgcaaatttaggtatggcaataggtgtattaacaggtattgcaacaaaagaagaattacatgaagctgatattattttaaatagtgcggcagatattttagaagctttaaattaaaaagaaagacatagtgtatatgtgaattaatgtattcgatagaattgataaaataatcgataatatctatggaatatacattgaatataaacatatacgctatgtctttagtcttttatcgtgtatctacttgtcgatatgtttgaataattcgagcaattttgtttatcataggatttaaagattcggggtccttatggatatcatattcattaatattgatacgtacaactggacatgcattaaagctattaatccaatcgtcatagcgtttaaatagctttttccagtattcagggtctgtattaatttccatttcgcgaccacgttcaataatacgatcaatgacctcatcatagttacattctaaataaatcattacatcaggtttaggaaaataaggtgtcatgaccatggcattaaataagtctgaatatgttttgaaatcttctttactcattgtgccttcttcttcatgcatttttgcaaaaatatcaacatcttcataaattgatcgatcttggacaaagccaccaccatattcaaacatacgcttttgttctttaaaacgttcagctaagaagtaaatttgcaaatggaaactccatcgttcaaaatcgctgtaaaatttatctaaatatggattatgttcgacattttcaaaagacgttttaaagtttaatttatctgcaagtgcttgcgttagtgttgattttccaacaccaactgtacctgcaatggttataatggcattttgtggaataccgtaattattcattggtaatatctcctatcataggtaatataatatgtaatatatcttcgtaatcttgttcatttttaagaaaatcaatagaagttgtatcgattaaaactacatttgaaccattactttgtaaggactcataatactcacgataatctttttttaactttaacagatattcatcttctatttgatgctcaaaactacggttacgtttagcaattctagattttaacacatcaaggtctgcatctaaaaagataatcatattcggcataatcatatcttcagttaaaatatcataaattttactgaatttctgaaattcaacagaactcaaagtatttttagcaaatatcttatttttatgtatatgataatcactaactacaccttgatttagttgtgttacatcttgaaattgcttatatctattgcataaaaagaacatttcagtttgaaaactccatttagagatatcttcataaaagtctgataaaaatggattttctgtgatgatttctttttcttcataaaaatctaaagtttgacttaatttgtgtgcaagtgaagatttacctacgccaataggaccttcaattgctataaaaggtttgttcatattcacatctccaaatgttaaaatagacattgagtattgtaccataagtgaggtatctggacataaatgacaaatgatatatattttatgacattagcgattgaagaagctaaaaaagcagctcaactaggcgaagtacctataggtgctatcatcactaaagatgatgaagttatcgctagagcacataatttaagagaaacactacaacaaccaacggcgcatgctgaacatattgcaattgaacgtgcagccaaagtgttaggtagttggcgtttagaaggttgcacattatatgtaaccttagaaccatgtgtcatgtgcgcaggaacaattgtaatgagtcgcattccaagagtcgtctatggcgcagatgatcctaaaggtggttgtagtggcagtttaatgaatttattgcaacaatctaattttaatcatcgtgcaattgttgataaaggtgtacttaaagaagcatgtagcacattattaacaacattttttaaaaacttaagagccaataagaaatccaccaattagacgatagtacatactaattaaaatttgttagaattacattatatgataaattaatgacaatataaatgttaatagaaaagtatgtgcgctgagtatatattcttatttaagaacaagattttaaatttacgaaacgaggtaacataatgataaaactaatagccactgatatggatggcacgctacttaatgcagcacatgaaatttctcaacctaatattgatgcgattaaatacgctcaagaacaagggataacggttgttatcgcgacaggtcgagcattttatgaagcacaagcaccagttgctgacacagatttaacagtaccatatatttgtttgaatggtgctgaagtacgtgatgaaactttcaatgtaatgagcacttcacaccttaataaatcgttagtacacaaaattacaaatgttttaaaagatgcaggtatttattatcaagtatacacgagtcgtgcgatttatactgaagatccacaaagagatttagacatttacatagatattgctgagcgtgcaggtcaacatgcaaacgttgagcgtattaaaaatggtattcaaagacgcatagataatggtacgttgaaagttgttgataattatgatgctattgaaaacatacctggtgaattaattatgaaaatattagcatttgatggaaatttagaaaaaattgacaaagctagtaaaattttagctgaatctccgaatttagctatatcatcatcttcgagaggaaatatagaaataacgcattcagatgcacaaaaaggtattgcgctagaaacaattgccgaaagattagggattgaaatgaaagaagtcatgtcaataggtgacaatttaaatgacttatcaatgttagagaaagttggctatccagttgcgatggaaaatggtgcagaagaagttaaaaaaatagcgaaatatgtcacagatacgaatgaaaatagtggtgttggaaaagctattatgaaattattacgtgaacaacaagtttaataaaaaaagaggggtcaaatatgaaaggattaattattattggcagtgcacaagtgaattcacatacaagtgcactagcaagatacttaactgagcattttaaaacacatgatattgaagcggaaatattcgatttagcagaaaaaccgttaaatcaattagatttttcaggaacaacaccgtctattgatgaaatcaaacaaaatatgaaagatttaaaagagaaagcaatggcggcggactttttaatattaggaacgccaaactatcatggttcatattctggaatattgaaaaatgcattagatcatctaaatatggattattttaaaatgaaacctgtaggcttaataggaaatagtggtggtattgttagttcagagccattgtcacatttaagagtaatcgtcagaagtttactaggcattgctgtaccaactcaaatagcaacacatgattctgattttgctaaaaatgaagatggttcatattacttaaatgatagtgaattccaattacgagcaagattatttgtcgatcaaattgtatcttttgtgaataatagtccatatgaacatttaaaataatattaaaaaatatgtaaatatacattaaaaataggtatgtagcttaaggtatttcattgagaatgcttttaagtcacatgcctattttttgttctaatgcaccaatagtaagcctttgatattactgttgtgagcaatgttattaattaaaataagatgtaatagcgaattgaaaacaagcttagattaaaagtgagttttaaaaatatagataaataatttaaagcaattaaagaaaaaaagtattaaaaattgcaattcttaaactgttattcatattaatatttctagcaaataacattgtaaaataaagaaaaataattaaagtattgcactttattgaaatttatattacgatagtaatgcagaaatttatatatgcaaaatattatatttatcaaattttgatattttaaaggagtattattaaatgaataataaaaagacagcaacaaatagaaaaggcatgataccaaatcgattaaacaaattttcgataagaaagtattctgtaggtactgcttcaattttagtagggacaacattgatttttgggttaagtggtcatgaagctaaagcggcagaacatacgaatggagaattaaatcaatcaaaaaatgaaacgacagccccaagtgagaataaaacaactaaaaaagttgatagtcgtcaactaaaagacaatacgcaaactgcaactgcagatcagcctaaagtgacaatgagtgatagtgcaacagttaaagaaactagtagtaacatgcaatcaccacaaaacgctacagctaatcaatctactacaaaaactagcaatgtaacaacaaatgataaatcatcaactacatatagtaatgaaactgataaaagtaatttaacacaagcaaaagatgtttcaactacacctaaaacaacgactattaaaccaagaactttaaatcgcatggcagtgaatactgttgcagctccacaacaaggaacaaatgttaatgataaagtacatttttcaaatattgacattgcgattgataaaggacatgttaatcagactactggtaaaactgaattttgggcaacttcaagtgatgttttaaaattaaaagcaaattacacaatcgatgattctgttaaagagggcgatacatttacttttaaatatggtcaatatttccgtccaggatcagtaagattaccttcacaaactcaaaatttatataatgcccaaggtaatattattgcaaaaggtatttatgatagtacaacaaacacaacaacatatacttttacgaactatgtagatcaatatacaaatgttagaggtagctttgaacaagttgcatttgcgaaacgtaaaaatgcaacaactgataaaacagcttataaaatggaagtaactttaggtaatgatacatatagcgaagaaatcattgtcgattatggtaataaaaaagcacaaccgcttatttcaagtacaaactatattaacaatgaagatttatcgcgtaatatgactgcatatgtaaatcaacctaaaaatacatatactaaacaaacgtttgttactaatttaactggatataaatttaatccaaatgcaaaaaacttcaaaatttacgaagtgacagatcaaaatcaatttgtggatagtttcacccctgatacttcaaaacttaaagatgttactgatcaattcgatgttatttatagtaatgataataaaacagctacagtcgatttaatgaaaggccaaacaagcagcaataaacaatacatcattcaacaagttgcttatccagataatagttcaacagataatggaaaaattgattatactttagacactgacaaaactaaatatagttggtcaaatagttattcaaatgtgaatggctcatcaactgctaatggcgaccaaaagaaatataatctaggtgactatgtatgggaagatacaaataaagatggtaaacaagatgccaatgaaaaagggattaaaggtgtttatgtcattcttaaagatagtaacggtaaagaattagatcgtacgacaacagatgaaaatggtaaatatcagttcactggtttaagcaatggaacttatagtgtagagttttcaacaccagccggttatacaccgacaactgcaaatgtaggtacagatgatgctgtagattctgatggactaactacaacaggtgtcattaaagacgctgacaacatgacattagatagtggattctacaaaacaccaaaatatagtttaggtgattatgtttggtacgacagtaataaagatggtaaacaagattcgactgaaaaaggaattaaaggtgttaaagttactttgcaaaacgaaaaaggcgaagtaattggtacaactgaaacagatgaaaatggtaaataccgctttgataatttagatagtggtaaatacaaagttatctttgaaaaacctgctggcttaactcaaacaggtacaaatacaactgaagatgataaagatgccgatggtggcgaagttgatgtaacaattacggatcatgatgatttcacacttgataatggctactacgaagaagaaacatcagatagcgactcagattctgacagcgattcagactcagatagcgactcagattcagatagcgactcagattcagacagcgattcagacagcgactcagactcagatagcgattcagattcagacagcgactcagactcagacagcgattcagactcggatagcgactcagactcagatagcgactcagattcggatagcgactcagactcagatagcgattcagattcagatagcgattcggactcagacagtgattcagattcagactcagatagcgactcagattctgacagcgattcagactcagacagcgactcagactcagacagtgattcagattcagacagcgactcagattcagatagcgactcagactcagatagcgactcagattcagatagcgattcggactcagacaacgactcagattcagatagcgattcagattcagatagcgactcagattcggacagcgattcagactcagatagcgactcagactcagacagcgattcagattcagatagcgactcagactcagatagcgactcagactcggatagcgattcagattcagacagcgactcagattcagatagcgattcggactcagacaacgactcagattcagatagcgattcagattcagatgcaggtaaacatactccggctaaaccaatgagtacggttaaagatcagcataaaacagctaaagcattaccagaaacaggtagtgaaaataataattcaaataatggcacattattcggtggattattcgcggcattaggatcattattgttattcggtcgtcgtaaaaaacaaaataaataatatgattaacttaaccaggtccatgtggcctggttttttctgtttagaaattcccagatataaaacaaaaaatctttaaggaatagatacaatttaatttgttacagaaatgtaattgtctatgaattagaaaagctaagatattaatttcaagggcaaataatactattttttatgatgattaaataaagattacaaaactcataaaaacttttatttaaacacaaatgttaaataacgttttacgataaagaaaaataattaaagtattgtgctttatctaaaaatgtaatactatattgatatacatttttgtatttaaaacaattgtattatttaaaaatttgatgaattaggagtaatctaatgctaaacagagaaaataaaacggcaataacaaggaaaggcatggtatccaatcgattaaataaattttcgattagaaagtacacagtgggaacagcatcaattttagtaggtacaacattaatttttggtctggggaaccaagaagcaaaggctgcagaaagtactaataaagaattgaacgaagcgacaacttcagcaagtgataatcaatcgagtgataaagttgatatgcagcaactaaatcaagaagacaatactaaaaatgataatcaaaaagaaatggtatcatctcaaggtaatgaaacgacttcaaatgggaataaattaatagaaaaagaaagtgtacaatctaccactggaaataaagttgaagtttcaactgccaaatcagatgagcaagcttcaccaaaatctacgaatgaagatttaaacactaaacaaactataagtaatcaagaagcgttacaacctgatttgcaagagaataaatcagtggtaaatgttcaaccaactaatgaggaaaacaaaaaggtagatgccaaaactgaatcaactacattaaatgttaaaagtgatgctatcaagagtaatgatgaaactcttgttgataacaatagtaattcaaataatgaaaataatgcagatatcattttgccaaaaagtacagcacctaaacgtttgaatacaagaatgcgtatagcagcagtacagccatcatcaacagaggctaaaaatgttaatgatttaatcacatcaaatacaacattaactgtcgttgatgcagataaaaacaataaaatcgtaccagcccaagattatttatcattaaaatcacaaattacagttgatgacaaagttaaatcaggtgattatttcacaattaaatactcagatacagtacaagtatatggattgaatccggaagatattaaaaatattggtgatattaaagatccaaataatggtgaaacaattgcgactgcaaaacatgatactgcaaataatttaattacatatacatttacagattatgttgatcgatttaattctgtacaaatgggaattaattattcaatttatatggatgctgatacaattcctgttagtaaaaacgatgttgagtttaatgttacgataggtaatactacaacaaaaacaactgctaacattcaatatccagattatgttgtaaatgagaaaaattcaattggatcagcgttcactgaaacagtttcacatgttggaaataaagaaaatccagggtactataaacaaacgatttatgtaaatccatcggaaaattctttaacaaatgccaaactaaaagttcaagcttaccactcaagttatcctaataatatcgggcaaataaataaagatgtaacagatataaaaatatatcaagttcctaaaggttatacattaaataaaggatacgatgtgaatactaaagagcttacagatgtaacaaatcaatacttgcagaaaattacatatggcgacaacaatagcgctgttattgattttggaaatgcagattctgcttatgttgtaatggttaatacaaaattccaatatacaaatagcgaaagcccaacacttgttcaaatggctactttatcttcaacaggtaataaatccgtttctactggcaatgctttaggatttactaataaccaaagtggcggagctggtcaagaagtatataaaattggtaactacgtatgggaagatactaataaaaacggtgttcaagaattaggagaaaaaggcgttggcaatgtaactgtaactgtatttgataataatacaaatacaaaagtaggagaagcagttactaaagaagatgggtcatacttgattccaaacttacctaatggagattaccgtgtagaattttcaaacttaccaaaaggttatgaagtaaccccttcaaaacaaggtaataacgaagaattagattcaaacggcttatcttcagttattacagttaatggcaaagataacttatctgcagacttaggtatttacaaacctaaatacaacttaggtgactatgtctgggaagatacaaataaaaatggtatccaagaccaagatgaaaaaggtatatctggcgtaacggtaacattaaaagatgaaaacggtaacgtgttaaaaacagttacaacagacgctgatggcaaatataaatttactgatttagataatggtaattataaagttgaatttactacaccagaaggctatacaccgactacagtaacatctggtagcgacattgaaaaagactctaatggtttaacaacaacaggtgttattaatggtgctgataacatgacattagatagtggattctacaaaacaccaaaatataatttaggtaattatgtatgggaagatacaaataaagatggtaagcaggattcaactgaaaaaggtatttcaggcgtaacagttacattgaaaaatgaaaacggtgaagttttacaaacaactaaaacagataaagatggtaaatatcaatttactggattagaaaatggaacttataaagttgaattcgaaacaccatcaggttacacaccaacacaagtaggttcaggaactgatgaaggtatagattcaaatggtacatcaacaacaggtgtcattaaagataaagataacgatactattgactctggtttctacaaaccgacttacaacttaggtgactatgtatgggaagatacaaataaaaacggtgttcaagataaagatgaaaagggcatttcaggtgtaacagttacgttaaaagatgaaaacgacaaagttttaaaaacagttacaacagatgaaaatggtaaatatcaattcactgatttaaacaatggaacttataaagttgaattcgagacaccatcaggttatacaccaacttcagtaacttctggaaatgatactgaaaaagattctaatggtttaacaacaacaggtgtcattaaagatgcagataacatgacattagacagtggtttctataaaacaccaaaatatagtttaggtgattatgtttggtacgacagtaataaagacggcaaacaagattcaactgaaaaaggtatcaaagatgttaaagttactttattaaatgaaaaaggcgaagtaattggaacaactaaaacagatgaaaatggtaaatactgctttgataatttagatagcggtaaatacaaagttatttttgaaaagcctgctggcttaacacaaacagttacaaatacaactgaagatgataaagatgcagatggtggcgaagttgacgtaacaattacggatcatgatgatttcacacttgataacggatacttcgaagaagatacatcagacagcgattcagactcagatagtgactcagacagcgactcagactcagacagcgactcagactcagacagtgattcagattcagacagcgactcagattcagatagcgactcagattcggacagcgattcagactcagatagcgactcagattcagatagcgattcagactcagacagcgactcagattcagatagcgattcggactcagacagcgattcagactcagatagcgactcagactcagacagcgactcagattcagatagcgattcggactcagatagcgactcagattcagacagcgattcagactcagatagcgactcagattcagacagcgattcagactcagatagcgactcagactcagacagtgattcagattcagacagcgactcagactcagatagcgactcagattcggacagcgactcagactctgatagcgactcagactcagacagtgattcagacagcgattcagactcggatgcaggaaaacatacacctgttaaaccaatgagtactactaaagaccatcacaataaagcaaaagcattaccagaaacaggtagtgaaaataacggctcaaataacgcaacgttatttggtggattatttgcagcattaggttcattattgttattcggtcgtcgcaaaaaacaaaacaaataatacaatatgacccaggtccttgtggcctggtttttttataattacacatgcaatagatgtatttttcatataaaataaacaataaagatacggaataaaacttatatgaggcgataatatgaattacattttaggaacaattttagaaagtaaaattacaggtgtagaaaaagcgcaaataaatagattgaagttgttcaaacaacacggcatatcttcaaaatgtgtatatgttaaatggaatccttattcatacacatatgcgaagcaacatcagattgaaaatgatgtatttacaatgtatgactattttcaaaaagcaatcaattataaaaagacaaagcaagttaactggatacagtattgggaaaagtcatgtaggtacacattgaaatttgtggaaaattcaaatgatgtcagaatatatgatgaagagcaatttgtaatgtatgctcattttttagataaacagtatcatcaattaaattatgtgaattattttgatcataaaagaagaaaagtaaaacgcgaattgtatgatggaagaggctttttaagttgttctcgaattttaggtgaaggacaacggattgtactcgaaaattactatacacctaatggggaaatcgtcatccaaaaatattttgacgatataaaagggaaaaacacgctcacaaaggttatcttaaatgaagaccagcatcaacaattttttgatacagaagatgaattagttcaatattttctccatcaattatgtaaaaataatgatcaaatcatattagatcgtcctcatgaattaggaaatgttatagcgggattaaatcaaagtattccagttattgttgtgctccatagtacacatttatccggtgccggtaatggtataaaaagtttttataaaacagtgtttaataatttaacacgttataaagcgattgttgtatcaacagaaaagcaatgccaagatatttcacaatatattgaaaataaaataccagttatcaatattccggttggctacgtggcaaatttaaagtatcaatttgacatcaatcaaaaggagaaaaatcatatcatatcaattgctcgcctcgttgaaaataaacaaattaaacatcaaattgaagtaatcaagcaattagtaacaaaacatcccaatattcaattgaatatttatggacatggaaatggtttgtcagaatatcgacaacttgtagaagattatcatttatcggaacatgttaaatttcatggttttaagacgcatattaatgaagagattgctaaagcagaactgatgttatcgacaagtaaaatggaaggttttggcttagcaattttagagtcgctttcagtaggtacaccagtgatcagttatgatgtagattatggtccatcagaactgattcaagatggatttaatggctatttagtacctcaaggtgacatcaatcaaatggttgaaaaggtcgaccaattactaaataatactcaaaaattgcaacagttttcaattaatagcatagaatctgcacaacagtacaatgcaactactatcagtacaaagtggcaaaatattttaaactaagtcaaaagaaaaaagcattttcctagaatcatctatttaacaaacctcgttcatacgaacttacatgtttagttaaatgacataggaaaatgctatttttgtaaaaataaaggtaaagtacatttatataagacgaacaaattggtcccattgtttaattaacgacgctttactatattgttgtgcttttgccaaactaccttttgacagtcgttgctgtacttcaggatgatcaatcacatattttactttatcaaatagggcatcttcatcatttttagtaattaaataaccattgaaatctgaagtaatcagttcgttaggtccatatttaatatcataactaataactggaacaccatgtgctaaagattcaagtagcgctaaagagaaaccttccatgttacttgttattaaactcaaataggcatcgctatattcttggtctagattgcttaaaaagccgcgtaagtaaacatgattttccaatccatatttttgtatcaattcatttaattttttactttcagaaccaaaaccatacatatgaagctctatttttgggacatacgatactaagcgtttaattaattcaatttgttgatgtaattgtttttcaggtgaataacgagcaacggaaattaatttaacactgcgctgatctaatgtttggactggtgtatcaattgtttcactatagccgacaggaatattaacaactggaatagtatggttaatacgtttttcaacatctaatttttgctgctcagtagaaacgataattgcacgatatcgagataaattttcaaacatcgctttatatacatttttaaatggcgatgaatctaatgcatcaatatttttaatgtgtgtactgtgaagcacagctactactgggattgactcaggcgttaagttgaaaataggtgctgtgtacacattacgatcactgaaaaataaatccccatgttgatatagttgtttaatgaaaaatgcgcctaattccgtttcattattaaagaaatattgtttgttagcatagtaaacaataattttttgtacttctggtttgccatccttgtaagaaaaatacttttctaattttgtgtcaccttctggattatagaaaaattcacataatgtttgttgtttatcaacaagaatcctactacaacttaaaaagccacgcacatcataaaaatcacgttttacttttcgtctttgactatcaaaatgatttacataatctaatatacgatatttaggatcttgaaaatgggcatacattaagaaacgctcttgatcatatattctaaagtcatgactattttcaacatgttttaaagtataatgacattcatcagtccaatacgacaaccagtcaaatggttcattgcgttctaaatatgttgcttcttggaagaaatcatacatattaatatagtcagaactagtaatataattttgggcatttctatataaatatctattccatgacagaaatacacattgcgctggtcttcccatttctttaaataaatttaaacgattaataattgctttctctatcccagttaaattaacacctaaactattacctacaaaataattcatttacaacaccacttatatctattttttataattatatcacataatatttaattacttcttttaactggaagatgtgtttatttataaaacaacaaattttgatatttataatgatagtagttattcaatcaactacgaccaatatatcattgtagagcttaggatattgatttatgactcaggcacatcaaatgagaagatttataaaagagatatacaactctagaaggtataataaaaacgcgcaactaatgttacgcgtttgaattaatcatatgatattatttgcgatactttaatttagcgaaagcatcatgttgatggatagactcttcattacgacattcgatatcgaaaccgtctaaccaatcaaattcaactaagtccgcggcaattaaacgaattaagtcttcgacaaaacgtggattttcatatgcacgctctgtcacacgtttttcatcaggacgttttaaaatagggtatagaattgaacttgcattagcttccattgcatctaaaattttatttttatagtcatcaactatgtcttgatctttattaatatatgttttaacagtgacaacaccacgttggttgtgcgctgaatactcacttatttcttttgaacaagggcatagcgttgtgacagttgcttcaatagtaagttctttacgtgtaactttatcaccgtcaattgctaatccataagtgacatcggcattaccaactgctttaatatttgtggttggactatagcgatcaaagaaccatttcccagaaacatcaacgcctgccgcattttgtttcatattcgtttgtaaagtgcgtaacacctgataaagtgtattaaattcaagttcaataccattatcatagtgcttttcaacactttcgattatacggctcatattaatacctttttcgtcttttgttaaacttgttgaaaaactaaatgtgccagctgtttgatactggtcaacaagtacagggtacactaagtttttaataccaacttcttctatttcaaataaaaaatctttatgtgtactttgtaaatctgtcatttcgttcttagtagtaggtttcgtgccttcaataggatctacggaaccaaagtgtttccaacgaccttctcgtgtcgataaatcaaattcagtcatttttttcctccgttaagatttaaagtgatatgtccaatatggttcgactgttaaaaagctgtgttgtttaccatcgatttcaggacttgctaattgttttaaaaatggacctgtttgagaagcatgtgcttcaaatgccttaattttaagttctttaaaatctgtaatatcattttgaatatcaggttctccaagagcttcggttgcatcattactgaacgcaactaaagttaaacgagggcgttcttctttaggcatgcgttcaaccgttcgaattacagcgtctgctgttgcttcgtgatcaggatgtactgcatatccaggataaaatgaaataatcaatgatggatttgtatcatcgattaaagatttaatcataccatctatatgttcatagggttcaaattcgacagttttgtcacgtaaacccatttttcttaaatcagtaataccgataactttacaagcttcttctagttcacgctcacgaatacttggtaatgattcgcgtgttgcaaatgggggattacctaaatttctgcccatttgtcctagggttaaacatgcatatgttacaggtatgcctttttggatataatttgctaatgtgcctgcagatgagaaggtttcatcatcaggatgtggaaatattactaatacatgtctttcgtcagtcatgttgatgcctcctctataaattaaatggtcgctcactaatttgaagtgctgcagcgagttgaccttcgtaattaaaacctgcaattaaaaattcatcatgctcattgacctcaaaatgcgttagaccttgtacataaacccaaccaccatttgatagtttaagaccaatgcgataaggttctttattaccaccttttagttgtgcatgcgtatatgttatttgtatgtttcttaaaaaagtaccagcattaaaaacacgttgatcgaaatggttcgcataggccccatttgtcgtttcaacatgcagatacacaggtttatgttcaaaagaagcaagtaaatctataacttcttgttctttaattggttccaacacgttcactccttacactatcaatgtgtttatctttctattttactaaaaactattcgataattgtatacgattgctcaattatttataaattaattttcatgaagggtaattactcaggattacgtaatcatacagcattagttttttacttttaaaaatcaaaaatttgttggaatttgaaaagtgttaaacattaaaaatgatgctatattaatggtgtatgaatgaattcataagtttttaaaatgtattaaatttgtggaggcatgtaaacaatgaaagtattaaacttaggatcgaaaaaacaagcatcattctatgttgcatgtgagttatataaagagatggcatttaatcagcactgtaaactaggtttagcaactggtggtacaatgacagatttgtatgaacaacttgttaagttgttaaataaaaatcagttaaacgtagacaatgtatccacgtttaatttagacgaatatgtaggtttaaccgcatcacatccgcaaagttatcactattatatggatgacatgcttttcaaacaatatccttattttaatagaaagaacattcatattccaaatggagatgccgatgatatgaatgcggaagcgtcaaaatataatgacgttttagaacaacaaggtcaacgtgatattcaaattttaggtattggtgaaaatggtcatattggatttaatgaacctggtacgccgtttgatagcgttactcatatcgttgatttgactgaaagtactattaaggctaatagtcgatattttaaaaacgaagatgatgttccaaagcaagccatttcgatgggacttgctaatattcttcaagccaaacgtatcattttactcgcatttggtgaaaagaaacgtgctgctattacacatttattaaatcaggaaatttctgttgatgttccagtcacattacttcacaaacacccgaatgttgagatatatttagacgacgaagcttgcccgaaaaatgttgcgaaaattcatgtcgatgaaatggattgattgcaatgtttaattaagaaatgcctcgggaaaggttccaatagaaagataaaaagcattggaaggatgatttttagtggaattacaattagcaattgatttattaaacaaagaagacgcggctgagttagcaaataaagtaaaagattatgtagatatcgtagaaatcggtacgccaatcatttacaacgaaggtttaccagcagttaaacatatggcagacaacattagtaatgtaaaagtattagcagacatgaaaattatggatgcagctgattatgaagttagccaagcaattaaatttggcgcggatgtaattacaatactaggtgttgcagaagatgcatcaattaaagcagctattgaagaagctcataaaaataataaacaattactagttgatatgattgctgttcaagatttagaaaaacgtgcaaaagaactagatgaaatgggtgctgattatattgcagtacacactggttatgatttacaagcagaagggcaatcaccattagaaagtttaagaaccgttaaatctgttattaaaaattctaaagttgcagtagcaggtggaattaaaccagatacaattaaagatattgtcgctgaaagtcctgatcttgttattgttggtggcggaatcgcaaatgcagatgatccagtagaagctgcgaaacaatgtcgcgctgcaatcgaaggtaagtaatatggctaaatttagtgactatcaattaattctagatgaattaaagatgactttgtcacatgttgaagcggatgagttttcaacttttgcatccaaaatactacatgctgaacatatatttgtagctggcaaaggacgttcaggattcgtggcgaatagttttgcaatgcgcttaaatcagctcggcaaacaggcacatgttgttggagaatcaacgacacctgcgattaagtcgaatgatgtatttgtaattatctctggttcaggttccacggaacatttaagattattagcagacaaagcaaaatcagtaggtgctgacatcgtattaattactacaaataaagattctgcaataggcaatctagctgggacgaacatcgttttgcctgcaggtacaaaatatgatgaacaaggctcggcacaaccattaggaagtttgtttgaacaagcatctcaattatttttagatagtgttgtaatgggattgatgactgaaatgaatgttacggaacaaacgatgcaacaaaatcatgctaatttagaataaaataaagatagtcgataatatgatgcctaggcagaaatattatcgattattttttatttaaataataaattatagtataatatcaataataaacgaataggggtgttaatattgaagtttgacaattatatttttgattttgatggtacgttggcagacacgaaaaaatgtggtgaagtagcaacacaaagtgcatttaaagcatgtggcttaacggaaccatcatctaaagaaataacgcattatatgggaatacctattgaagaatcatttttaaaattagcagaccgaccattagatgaagcagcattagcaaagttaatcgatacatttagacatacatatcaatctattgaaaaggactatatttatgaatttgcgggtataactgaagccattacaagtttgtataaccaagggaaaaaacttttcgtggtgtctagtaagaagagtgatgtattagaaagaaatttatcggctattggattaaatcacttgattaccgaagctgttggatccgatcaagtaagtgcatataaaccaaatcctgaaggcatacacacaattgtgcaacgctacaatttaaatagccaacaaacggtgtatattggtgattcaacgtttgatgttgagatggcacaacgtgctggtatgcaatctgcagctgtcacttggggtgcacatgatgcaaggtcattacttcattcaaatccggattttattattaatgatccatcagaaattaataccgtattataaaacttgttaaaacagagaataccatggttaaaatgcatattcataaatattagattatacttagaaatatttcgctttagattaggaatttaaaataaatatttattaaacattatgaatttttaaagagtaatgtctgactcgttgataatttatttttgtaaaaataaattaaagtaatgacaaagttattgaagtaaattgagtataaacatttaaatacgatgtcgaaaatggcgatagcatatcacttacatgaagttgtgtgctatcgctatttttagttataattccaaaaagttaatcgttcgatgatttaagaattattattgtttaattcaaatgtatgagggtataaaatcattgaatttaattcgataaagcgaaatttttgaacaaacatacttttgtatttatataaaagtttaaattcttataaatttgacaaaactaattaactccgtataattatgaaacatacaagagggagtgtatgaattcatggattttaataaagagaatattaacatggtggatgcaaagaaagctaaaaaaaccgttgttgcaaccggtatcggtaatgcaatggaatggttcgattttggtgtctatgcatatacaactgcgtacattggagcgaacttcttctctccagtagagaatgcagacattcgacaaatgttgactttcgcagcattagccattgcgtttttattaagaccaattggtggtgtcgtatttggtattattggtgacaaatatggacgtaaagttgtattaacatctacaattattttaatggcattttcaacattaaccattggattattgccaagctatgatcaaattggactttgggcaccaatactattattgcttgcaagagtactacaagggttttcaacaggtggagagtatgcgggggcaatgacatatgttgccgaatcatctccagataagcgtcgtaactcattaggtagtggactagaaattgggacattatcaggttacatagctgcttcaattatgattgctgtattaacattctttttaacagatgaacaaatggcatcatttggttggagaatcccattcttactcggtttattcctaggattattcggcttatatttacgtcgtaagctggaagaatcaccagttttcgaaaatgatgttgcaacacaaccagaaagagataacattaactttttacaaatcatcagattttattacaaagatatatttgtatgttttgtagctgttgtattcttcaatgttacaaactatatggtaactgcatatttaccaacctatttagaacaagttattaaattagatgcaacgacaacaagtgtattaattacttgtgtcatggcaataatgattccattagcattaatgtttggtaagttagcggataaaataggtgaaaagaaagtatttctaattggtactggtgggctaacattattcagtatcatcgcatttatgttattacattcacaatcatttgttgtaatagtaatcggtatatttatattaggatttttcttatcaacttacgaagcgacaatgccagggtcgttaccaacgatgttttacagtcatataagatatcgaactttatcagtaacatttaatatctctgtttcgatatttggtggtacgacgccattagttgcaacatggttagttacgaaaactggagatccattagcacctgcgtattatttaacagcaatcagtgttattggctttttagttattacattcttacatttaagtacagcaggaaaatctctaaaaggttcgtatccaaatgtagataacgagcaagatagagcttattatgcagaacatccaaaagaagcattatggtgggttaaagaacgtaagaattagagattttaataaaaagtataaatcaatcgtatataagcactttaaagctagtaggttctgctaactttaaagtgctttttaaattgagaactgtaattagccgtaataaagtttttgtatatacataaacccccactgcaatgattatcgcaatgggggaaagaggggacttaaagcatatgtttagctttgaatacttaaaattctcttgctattgaaatgttaggatgtaaatatgtcttagagtattttgtccaacgcaattaatattgagactctaaccttcaatattattatagagaacacaaacttaaatagattgggtgacttatttgtgtcagttattgcgattgcgataacttcttttctctatatacatatagtaacgtcttatctaataaaaaacatggtactacagtatcaaatttatctagggcttaagtttgatttttataataggcaggtttacctgataaaaatacttattcattatataatgttaacaatatgtattttaaagtttacattgagtgagggatattgatgaacgtaattttagaacagttgaaaacacatactcaaaataaacctaatgacatagcattacatatcgatgatgaaacaattacatatagtcaactaaatgcccgcatcactagcgcagttgaatctttgcagaaatattcacttaaccctgtcgttgctattaatatgaaatcaccggtgcaaagtattatttgttatttagctttgcatcgtttacataaagtgcctatgatgatggaaggtaaatggcaaagtactatacatcgtcaattgattgaaaaatatggtattaaagatgtaattggagatacaggtctcatgcagaatatagactcaccgatgtttattgattcaacgcaattacagcactaccccaatttattacatattggttttacttcagggacaactggactgccaaaagcatattatcgtgatgaagattcatggttggcttcttttgaagttaatgaaatgttgatgttaaaaaatgaaaatgcaatagcagcccctggaccactatcgcactcgttaacattatatgcgttattgtttgctttaagttccggtcgtacttttataggacagaccacttttcatcctgaaaagttacttaatcaatgtcataaaatatcatcatacaaagttgctatgtttcttgttccaacgatgattaaatcattattgttagtttacaacaatgaacatacaatccaatcattttttagcagtggagataagctgcattcttctatttttaaaaagataaaaaatcaagcaaatgacataaatttgattgaattttttggtacatcggaaaccagttttatcagctataacttgaatcagcaagcaccagttgaatcagtaggtgtgctatttccaaatgtggaattgaaaacaacgaatcacgatcacaatggtataggaactatttgtataaaaagtaatatgatgtttagtggctatgtaagtgaacaatgtataaataatgatgaatggtttgttactaatgataatggctatgtaaaagagcagtatttatatttaacgggacgtcaacaggatatgttaattattggtggtcaaaatatatatccagcacatgttgaacgccttttaacgcaatcttcgagcattgatgaagcaattatcatcggtattccaaatgagcgttttggtcaaataggcgtattgctttattctggtgatgtgacacttacacataaaaatgtaaaacaatttttaaaaaagaaagtgaaacgctatgaaattccatcgatgattcatcatgtagaaaagatgtattacactgcaagtggtaaaattgctagagaaaaaatgatgtcgatgtatttgagaggtgaattataatatgaatcaagcagtcatagttgcagctaaacgaactgcatttgggaaatatggtggcactttaaaacatttagagccagaacaattgcttaaacctttattccaacattttaaagagaagtatccagaggtaatatctaaaatagatgatgtagttttaggtaatgttgttgggaatggtggcaatattgcaagaaaagcattgcttgaagcggggcttaaagattcaatacctggcgtcacaatcgatcggcaatgtgggtctggacttgaaagtgttcaatatgcatgtcgcatgatccaagccggagctggcaaggtatatattgcaggtggtgttgaaagtacaagtcgagcaccttggaaaatcaaacgaccgcattctgtgtacgaaacagcattacctgagttttatgagcgtgcatcatttgcacctgaaatgagcgacccatcaatgattcaaggtgctgaaaatgtggccaagatgtatgatgtttcaagagaattacaagatgaatttgcttatcgaagtcatcaattgacagcggaaaatgtaaagaatggaaatatttctcaggaaatattacctataaccgttaaaggagaaatattcaacactgatgaaagtctaaaatcacatattccgaaagataactttggccgatttaagcccgtgatcaaaggtgggaccgttaccgctgcgaatagttgtatgaaaaatgatggtgcagttttattgcttattatggaaaaagatatggcatacgaattaggtttcgagcatggtttattatttaaagatggtgttacggtaggtgttgattctaattttcctggcattggtccagtaccagccatttccaacttactaaaaagaaatcaattaacgatagaaaatattgaagtcattgaaattaacgaagcgttcagtgcacaggtagttgcctgccaacaagctttaaatatttcaaatacgcaattaaatatatggggtggtgcattagcatcaggtcatccatacggtgcaagcggtgcccaattagtgactcgattattttatatgtttgacaaagagactatgattgcatctatggggatagggggaggtctaggaaatgcagcattatttactcgattctaaccagcgattaaatgtgtcattttctaaggatagtgtggctgcatattatcagtgttttaaccaaccttatagaaaagaagtaccaccattaatgtgtgcgtcattatggccaaaatttgatttatttaaaaaatatgcaaatagcgaactgattttaacaaaatcagcaattaatcaaactcaaaagatagaagtagacacaatatatgtagggcatttagaagatattgaatgccgacagactcgcaatatcacacgttatacaatggctttaacattaactaaaaatgatcaacatgtcataacggttacacaaacttttattaaggcgatgaagtagagatggagtttaatgagatatggataaatgaatatttggcgctcgtaaatgatgataatccaatacataatgagattgtgccaggacaattagtgagtcaaatgatgctgatggctatgtcattagagacaaaccagtgtcaaattaactacgttaaacctattttaataaatgaaaatatcgaattcattgaacaacacgaacacgaaattatagcaattaatgacgatggagagattaaaataaaaatttctttgagcacaaaaaaataaccgatattagctgcatgaacgcatattaattaggagatgaaaggacagctaatatcagttatgtattgttattattattgggaacagagatgaatataggttacgtttctttctttgcacggggatgcattaatctaaaataataataacaactatatcaatgtttaataaattctggattattggaacgattagtcaatttaactaactttcatatgatctatatcgtcttgtaataaagagagcaatttgaatatttcagtatcactaaatgaatcgtcacatttaattgaaacatgctgaaacgttttggttataatttcataaactggtgcgccttcatggtgatactgtcgataaataatcataacctatattacctcctttgctactctatggttatattataaataacatttttatgtgtgacatcaaccttaagtatcaactttttatcagacatagaacgtatgatttactaagactatttatgtataaaagttctaaataaatatatatttatagagtcgcctggcagtcatttgggaaatataacatatatgattagagaggcatctatcgcaaaagaatgataatgatagaggtattgagcatatagatgagtttaagttcatcttgaaaataaagggttatttagtcatagatgtagatgtataggaaatatttgtatgtattgttcgatatgtatgaaattttcaataaaagctaataacgcttatatgtaactttcaaatttaaattatatacagagcatgatgattataaaaaaataaccacatcacataaattgagttcatacccaatttaagtggtgtggctaataatgttgatttatagatgaaccgcctaatcgttaaacctctgttacttcaacatcgatatgttcaatacggttgtatgcaccgtgatccacaggaccaacaaaatcattcattttccaaccgtttttaatagcagaagcgacgaaagctttcgcgctaatcacagcttctttcggtgacttaccgttagctaaatatgcagttgttgccgcagcaaatgtacaaccagcaccatggttataactttgttggaacatgtctgttgttagttgataaaatgtttgaccatcatagtataagtcatacgatttatcttgatctaaagctttgccacctttaatgatgacatgctgtgcgcctttatcaaagataattgttgcagcctttttcatatcttcaattgaatttaatttacctaatcctgataattgacccgcttcaaataagtttggtgtcactaccgttgctttaggtagtaaatatttaatcatcgcctcagtatttccaggattaagcacttcatcttcgcctttacaaaccatgacaggatctactacaaaatattgtgcattagatgcctcatatacttctccagcacgtttgattatctcctcagtacctaacatacctgttttaatagcatcaggtccgattgataaagccgtttcaagttgtttttcaaatacatccattggtaatggtgtaacatcgtgtgaccatgtatctttatccatagtaacgatggcagttaaagcgaccatgccatacgtatctaattcttggaacgttttcaaatctgcttgcatacctgcgccagcacttgtgtcagaaccggcaattgttaaaactttctttaaagccattgagcttcactcctacataataatattgtattcatcatatcatttttaacctaattgaaaaatattaagcattcaatatttgatgattgttgaaatgaatcattcatactattgtaacttttgaaaatgtcattcactttagataagtgtgatatgttaaaatatgtcctgaggtgagattgaatggaatggtcgcaaatttttcatgacataacaacgaaacatgactttaaagctatgcatgattttttagaaaaagaatattcgactgcaatcgtataccctgatagggaaaatatatatcaagcgtttgatttaacaccgtttgaaaatatcaaagttgttatattaggacaagacccgtatcatggtccaaaccaagcacatggattagcattttcagtgcaacctaacgcaaaattccctccatctttacgtaatatgtataaagaattagcagatgatattggatgcgttagacaaacaccgcatttacaagattgggcaagagaaggcgtcttgttattgaatacagttttaaccgtaagacagggtgaagcaaattctcatcgtgatattggttgggaaacatttactgatgaaattattaaagcagtgtctgattataaagaacatgttgtctttattttgtgggggaaacctgcacagcaaaaaataaagcttatcgatacatctaaacattgtattataaaatcagtgcatcctagtccactgtctgcatatagaggattctttggatcaaaaccgtattccaaagcgaatgcctatttagagtcagtaggaaaatcaccaattaattggtgtgaaagtgaggcgtagatgttgaatagagaaactttaatagcacgaattgagcaagaattagtacaagcagagcaggcacagcatgaccatgactttgaaaaacatatgtatgccatacatatattaacatctttatatgcttcaacatcaaatacaccacatattggtgaacaacaaatgaatcgtcgtattgctaaccataatcaaatgccacaatcacaaataacgcagccaactcatcaagtgacagttgctgaaattgaagcgatgggtggtaaagtaaatacgcattcagcacatcatcataataagtcatattcacaaccttcaaaccaacaacaaagattagcgacagatgatgacattggcaatggtgaatccatatttgatttttaaaaagcaacaatgaaacataattacttaatagcttgttaagtatgtaggttaataatcaagacgcatatacttttattcgagtgttcggatttaaacatttattaatactgaattatataaggagaggtagcaatgaaattatttattattttaggtgcattaaacgcgatgatggctgtcggtacaggtgcatttggtgcgcatggtttacaaggaaaaataagtgatcactatttatcagtatgggaaaaagcaacgacgtatcaaatgtaccatggcttagcattattaattataggtgtaattagtggtacaacttcaatcaatgttaactgggctggctggttaatatttgctggtattattttctttagtggatcattatatattttagtattaactcaaattaaagttttaggtgcgattacgccaattggtggcgtattgttcatcattggatggataatgttaatcattgcgacattcaaatttgctggttaaattttaaaactttagattacctatgtaactaaacattaaatttttaataaaaataatcaagaaaaagagttacaaactcatcttttgggtatagaataccttcgaggtgagtttttatttatggaaaaaaagaataagcaaatagatagaggcgatttaaaacaaaacctatctgaaaagtttgtatgggcgattgcatatggttcatgtatcggatggggcgcattcatcttaccaggagactggattaagcagtcaggtccgattgcagcatcaattggtatagttattggtgcattattaatgatattaattgcggttagttatggcgcattagtagagagatttccagtatcagggggcgcgtttgcctttagtttcttaagtttcggcagatatgtgagtttcttctcatcatggtttttaacttttggttatgtctgtgtcgttgctttaaatgcgaccgcattcagtttactagttaaattcttattgccagatgtcttaaataatgggaaactatacaccattgcgggctgggacgtttatattacggaaatcattattgcgaccgtattactacttgtattcatgctagtaacgattcgtggcgcaagtgtatctggatcattacaatattatttctgtgtggcgatggtaatcgtcgtattattgatgttctttggttcattctttggtaataattttgcacttgaaaatttacaaccgttagctgaacctagcaaaggatggttagtgtctattgtggttattgtatccgtggcaccatgggcatatgttggatttgataatattccacaaacagcagaagagtttaactttgcaccaaacaagacatttaagcttatcgtgtacagtttattagcagcatcattaacttatgttgtcatgattttatacactggttggttatcaacaagtcatcaaagtttaaatgggcagttgtggttaacaggtgctgttacacaaacagcatttggttatattggattaggtgtattagcaattgcaattatgatgggtatatttactggtttaaatggattcttgatgagttcaagtcgcttgttattttctatgggacgttcaggtattatgccaacaatgtttagtaaattacatagtaaatacaaaacaccatatgtcgcaatcatattcctagtaggagtgtcgttaattgcaccttggctaggaagaactgcattgacttggattgtagatatgtcatctactggtgtatccattgcctactttattacatgtttgtctgcagcgaaattattcagttataacaaacaaagtaatacgtatgcaccggtttacaaaacgtttgctattatcggctcatttgtatcattcattttcttagcgttgttattagtgccaggttctcctgcagcactgactgcaccgtcttatattgcattacttggatggttaatcatcggtttaatattctttgtgattcgatatcctaaattgaaaaatatggataatgatgaattaagtcgcttgattttaaatagaagtgaaaatgaagttgatgatatgattgaagaacctgaaaaagaaaaaactaaataataaaagaatcgcacaataaaccttcttcattcggaggcgtatcgtgcgattttttgtattataaattgacatttaagacgaggcagctgaaccttatatataattgctaagagttagggctgagccatttctaacaaatatttataatcgtttaaaagatttcacgaacccagaaacaattaatttggaaatttggtcggcgaataataaacctaatgcgatggcgcctgcaataagtgtaacctctagcatggtattgattgctgtactgaaatttaataagactaaattttttgtagcatcgtatgctaagccaccaggtactaatggaatgatacccgttaccataaaaatgatggcaggttctttttgtttacgagccatataatgacttaacaagcctaatgctaaactaccaaagaaactagagtatatagtgtgcacattaaagccgttgaagaataaggtgtaaaccatccatccacacgtaccaacgaaaccacatgatagatataattttctaggtgcatcaaaaatgacgcagaagaacattgaagctaaaaagctaaagataaagtttaagatccaaaacatagtctgatactcctatactaaaattaatacgctaccaacgccagcaccgatgccaaacgcagtaaccaatgcttctaatgatttcgttgtgaacatcaacatgtgtccaccaaataaatcttgtattgcgtttgttattaatacaccaggaacaataggcatgactgccgcaatgataatagttgccaagtcacctgttggaataagtgtatgtccaataacggcgataatcccaataactaatgaaccaatgaattctgggataaactgtgcgtgtaacttacgatctaaaatctcagtgactaggtatcctagactacctgctaatatcgcagttaaaacatcaatcaatctaccaccttgtaaatataagaaactcattgcaatcattgctgcagcaaaacctttaaagggaagactgctgtcacgcttagcaacatatattttttcaagttgcgtttttgcttcggctaaagaaatttcattgtttgtaatttgacgcgaaattttattagcttgagaaatttttattaagtttgtatctcgagaggtaattctaaatattctaggaaacgattccgaatgtaacgtaaactggatgacagtgtttgtaacaaagctgttactttcactgtaaccaagtttttttgcaatacgtgtcatggtatcttctacacgcgtaccttctgcaccagattctaatagtatgcgagcagcaagcatgacaacgtctttgataagtacctcttgtttgtattcttctgaatttatgtccatttcatcaccattgtttataagaatttaatactcattatagtttatacactataaaataaccacatgagctttttgataagttgttattgattttaaaaaactaatatttgatactattgtaataataatcatcggaatttttagtagttaaaattctcttgaagtataaaaaggaaaaattattgaaaaaaattcgacaaaaatatgtttcaaatatttcaaataggttaaaataatattagttaaccattacaaaaattgtatagagtagcgactgtataatttctattgaggttaacgtttatatgtagtgatagtagttaaagttctcccaaggaagactactcgggtacactttgctatgagcaaagtgtactttgttattgataatacattagcacatatatataagtttaaacatacagatttcaactatttaccaaatcacgtcttatgtatacgggaatatactgaagataaacgaaaaattccaagcttaaaccgataagcttggaatttttttattaatttataaacgtaccaatgtattaagaaatcgcaaagaattgatcgaattcgtttgtgttaataatatgtcctacaaagaaactaccgaattcaccgtatcgtgctgttgtttcatcaaagcgcatttcgtatacaatttttttgaattgtaatacgtcatctgagaacaatgttacgccccattcgaaatcatcaaaccctacagaaccagtaataaattgtttgattttgccagcatattttctaccaatcataccatggtcatacattaatttttggcgttcttccatagttaacatgtaccagttataagtttcattacgacgtttgttcattggatagaaacaaatataatcagaatgtggtaattctgggtataatcttgctttgatatgagggttctcataaggatcttcatcagatttaccagctaaataattgctcaattcaatgactgatacatatgaatatgtagggattaggaagtcagcaatgcgcaatttgttaaattcattttcaatatgatttaaagacttcatttcaggacgtaagaaccataataacaaatctgctttttgaccagttatattataaatagcttgatcaccagattttgatgatcttacagttgctgtattttctaaaaatgattgaaattcagtgacaagtgcatcgcgttcgtcctttggaactatacgtaatgatgcccaatcaactgcataaaataaatgtagactataccaaccatctaatgtttcggctgcttgactcatgtttatcgctccttttcaaaaatcatcagttctttataaattttatcataaagcaaaggggtaacgataaaattatgattacaaattggtgacgtggcattatgaaataaaatggcgtataattataccgtgaatgattaataagatttatattacaggaggacattatggctgatttattaaatgtattaaaagacaaactttctggtaaaaacgttaaaatcgtattacctgaaggagaggacgaacgtgttctaacagctgcaacacaattacaagcaacagattatgttacaccaatcgtgttaggtgatgagactaaggttcaatctttagcgcaaaaacttgatcttgatatttctaatattgaattaattaatcctgcgacaagtgaattgaaagctgaattagttcaatcatttgttgaacgacgtaaaggtaaagcgactgaagaacaagcacaagaattattaaacaatgtgaactacttcggtacaatgcttgtttatgctggtaaagcagatggtttagttagtggtgcagcacattcaacaggcgacactgtgcgtccagctttacaaatcatcaaaacgaaaccaggtgtatcaagaacatcaggtatcttctttatgattaaaggtgatgaacaatacatctttggtgattgtgcaatcaatccagaacttgattcacaaggacttgcagaaattgcagtagaaagtgcaaaatcagcattaagctttggcatggatccaaaagttgcaatgttaagcttttcaacaaaagggtctgctaaatcagacgacgtgacaaaagttcaagaagctgtcaaattagcacaacaaaaagctgaagaagaaaaattagaagcaatcattgatggcgaattccaatttgatgctgcgattgtaccaggtgttgctgagaaaaaagcgccaggtgctaaattacaaggtgatgcaaatgtctttgtattcccaagtttagaagctggtaatattggttacaaaattgcacaacgtttaggtggatatgatgcagttggtccagtattacaaggtttaaattctccagtaaatgacttatcacgtggctgctcaattgaagatgtatacaatctttcaattattacagcagcgcaagccttacaataacgatggatttagcgagtaaatattttaatggcgtcaactggcgatatatcgatcattcttctggattagaacctatgcaatctttcgcattcgatgatacattttgcgaaagtgtgggcaaagatatatcagataatgttgtgcgtacttggattcatcaacatactgttattcttggtattcatgattcaagattgccgtttttaaaagatggcattgattatttaacgaatgagattggttataatgccattgttagaaattctggtggcttaggtgtcgttctagatcaaggtgtattaaatatatcgctgatgttcaaaggacaaacagaaacaacgattgatgaagcgtttactgtgatgtacctcttaattagcaaaatgttcgaaaatgagaatgttgatattgatacgatggaaattgaacattcttattgcccaggaaaatttgacttaagtatcgatggtaagaaatttgcaggcatatcgcaacgaagagttagaggcggtattgctgtacaaatttatctttgtgttgaaggctctggttcagaacgtgcattgatgatgcaaacattttatgaacatgctttaaaaggtgaagtgactaaatttaaatatcctgaaattgaaccatcttgtatggcctcattagagacattgcttaacaaaacgattactgttcaagatgtaatgtttttactattatatgcaatcaaagatcttggcggtgtattaaatatgacgccaattactcaagaagaatggcaaagatacgatacgtattttgataaaatgattgaaagaaacaagaaaatgatagatcaaatgcaatagttaaatatttaacagcccctttcaagttatcgtttggggctgttatttttgaaagtatccataaaaagcataaatatgttattgacctaatatttaaattgaacatcattaaattaaaagtaatgatatgatggaaataataaatttaataagaaaatttcatgttttacgtattaaatagattgagaatagggtatatataatgcgtatgactatgaaagaaacgaccttctattgaaatgttctaatactttagtagtaaatctatatattccaattattatttgtagtattatagttagggtggaaaattataaattgtagggctattttataaaaagataaagaatctgaaatatcactcgataagatttaaactttgaagtaaacgaaagttagttttatactaatcaagttaagtcaaatataaattcaaaataaagattatacataatatgaataatgtgagataaagactgcaatgaaatttaacgcgaatgcgtatgcaacttagaatatgatgtcttttactaataaataaaaataatgaatcaagtataggataaatataaaaggtgatattgacatgacaagaaaaggatatggggaatcgacaggtaagattattttaataggagaacatgctgttacatttggagagcctgctattgcagtaccgtttaacgcaggtaaaatcaaagttttaatagaagccttagagagcgggaactattcgtctattaaaagcgatgtttacgatggtatgttatatgatgcgcctgaccatcttaagtctttggtgaaccgttttgtagaattaaataatattacagagccgctagcagtaacgatccaaacgaatttaccaccatcacgtggattaggatcgagtgcagctgtcgcggttgcttttgttcgtgcaagttatgattttttagggaaatcattaacgaaagaagaactcattgaaaaggctaattgggcagagcaaattgcacatggtaaaccaagtggtattgatacgcaaacgattgtatcaggcaaaccagtttggttccaaaaaggtcatgctgaaacgttgaaaacgttaagtttagacggctatatggttgttatagatactggtgtgaaaggttcaacaagacaagcagtagaagatgttcataaactttgtgaggaccctcagtacatgtcacatgtaaaacatatcggtaagttagttttacgtgcgagtgatgtgattgaacatcataactttgaagccttagcggatatttttaatgaatgtcatgcggatttaaaggcgttgacagttagtcatgataaaatagaacaattaatgaaaattggtaaagaaaatggtgcgattgctggaaaacttactggcgctggtcgtggtggaagtatgttattgcttgccaaagatttaccaacagcgaaaaatattgtaaaagctgtagaaaaagctggtgcagcacatacttggattgagaatttaggaggttaatgcgttgattaaaagtggcaaagcacgtgcacatacgaatattgcacttataaaatattggggtaaaaaagatgaagcactaatcattccaatgaataatagcatatctgttacattagaaaaattttacactgaaacgaaagtcacttttaacgaccagttaacacaggatcaattttggttgaatggtgaaaaggttagtggcaaagaattagagaaaatttcaaaatatatggatattgtcagaaatagagctggcatcgattggtatgcagaaattgaaagcgacaattttgtaccaacagcagcagggttggcttcatcggcaagcgcatatgcagctttagcagcagcttgtaatcaagcgctagacatgcagctgtcagataaggatttatcgagattggcgcgaattggttcgggttctgcgtcgcgtagtatttatggtggatttgcagaatgggaaaaagggtatagtgatgagacgtcatatgccgttccacttgaatcgaatcattttgaagatgaccttgccatgatatttgttgtgattaatcaacattctaaaaaggtacctagtcgatatggtatgtcattgacacgaaacacatcaaggttttatcaatattggttagatcatattgatgaagatttagctgaagcaaaagcagcgattcaagacaaagattttaaacgccttggtgaagtaattgaagaaaatggtttgcgtatgcatgccacgaatctaggatcaacaccgccgttcacatatcttgtgcaagaaagttatgatgtcatggcgcttgttcacgaatgccgagaagcggggtatccgtgttattttacaatggatgcgggacctaatgtgaaaatacttgtagaaaagaaaaacaagcaacagattatagataaattattaacacagtttgataataaccaaattattgatagtgacattattgccacaggaattgaaataattgagtaaggaagagataaaatgattcaggtcaaagcacccggaaaactttatattgctggagaatatgctgtaacagaaccaggatataaatctgtacttattgcgttagatcgttttgtaactgctactattgaagaagcagaccaatataaaggtaccattcattcaaaagcattacatcataacccagttacatttagtagagatgaagatagtattgtcatttcagatccacatgcagcaaaacaattaaattatgtggtcacagctattgaaatatttgaacaatacgcgaaaagttgcgatatagcgatgaagcattttcatctgactattgatagtaatttagatgattcaaatggtcataaatatggattaggttcaagtgcagcagtacttgtgtcagttataaaagtattaaatgaattttatgatatgaagttatctaatttatacatttataaactagcagtgattgcaaatatgaagttacaaagtttaagttcatgcggagatattgctgtgagtgtatatagtggatggctagcgtatagtacttttgatcatgaatgggttaagcatcaaattgaagatactacggttgaagaagttttaatcaaaaactggcctggattgcacatcgaaccattacaagcacctgaaaatatggaagtacttatcggttggactggctcaccggcgtcatcaccacactttgttagcgaagtgaaacgtttgaaatcagatccttcattttacggtgacttcttagaagattcacatcgttgtgttgaaaaacttattcatgcttttaaaacaaataacattaaaggtgtgcaaaagatggtgcgtcagaatcgtacaattattcaacgtatggataaagaagctacagttgatatagaaactgaaaagctaaaatatttgtgtgatattgctgaaaagtatcacggcgcatctaaaacatcaggcgctggtggtggagactgtggtattacaattatcaataaagatgtagataaagaaaaaatttatgatgaatggacaaaacatggtattaaaccattaaaatttaatatttatcatgggcaataaatgatttgataggggagcaatcatctaatttaattagaagataaatgctccattttttattgtcagccgtgttacgtatcttgaaaaaaatattaaaaagagtaaaatagatagagttaacgaaaaaattaatgaaatcgacgatatagatatgataaagaaaggtgggtagcaatatgaaaaatacattccttatttgtgatgaatgtcaggcagtcaatataagaacgttacaaaagaagttggaaaaattagatcccgatgctgaaatcgtgataggttgtcaatcttattgtggacctggacgccgaaaaacattcacttttgttaataaccgcccactggctgcgcttactgaagaagaattaatcgaaaaagtttctcaacaattaaagaaaccacgtgatcctgaagaagaagagcgtttaagaaaacgacatgaagaacgtaaacgtcgtaaagaagaacaagatagaaagcttaaagaaaaattagaaaagcgaaaagcacaacaataaagcctgatggcagcatcattcaatgcgtgccaccaggtttttatgttttgtctagaaattaaataaatcattaaatgattcggccatcgtaggatgcgtataaatattatctcgtaatacggtatatggaatgttttgatcaatcgcaagtttaattatattaattaattcttcagattgcttaccatataatgtagcacctaaaatcatattattttcattattaatgactactttaaataaacctcttggatcattgttaattttatgacgaggtatagcacttactaaaagttgatgttcagtgtaatcataatgttgagcggcagcttctttactagttaatccaacacgtgataatggtggatctataaatactgtataaggcacgctgcctctattgtcagtcgtacgtgactgattaccatataacgctgatttgataattcgataatcatctaaagatatatacgtaaattgaagtccgcctttaacatcacctgcagcataaatatgcggcacagttgtttgaagatgagcattgactttaatttcgcctctgtcgcctaattcgatatcagtattttctaaagctaaatccgtattcggtttgcgcccgatagccaaaagtactgcatcagcctcaaagttaccaacgttggtatggactgttgtatgatgattgtcagatgacaattcagtcgtttcaacatttgtatgcaatgcaatgcctttattttctaagtcagtaataccatatgcaacgacatcttgatcttcgcgtggcataaatgattcgccacgttctaatactgttaccttactacctaaattcgcaaacattgaagcaaattctaaggcgatataaccgccacctacaataacgaggtgcttaggttgatagctaatgtttaataaacctgtcgaatcgaagacgtgtttagcttgatcaaggcctttaatgttaggaatgacagaggtagcaccggtattaataatgatatgaggtgcagtaatactatcgacgatatcgtcatgttgatctaataaattcacttcagtattagatttaaactgcgctttaaaatccagtacatcaatgttgttatcgtctgctaataagtggtaatttttattgtttagcgcattgacaacatcgtttttacggttataacttgcttcaaaagatttgccttctaatccatcatgtacaagtgtcttcgaaggtatacatcctatgtttatacaagtgcctccatacattttcggagattgttcgataactgcgacgtgttgacctgttgatgcagcgtatttcgctaaagttttaccagctttcccaaatcctattacaattaaatcatatgttttcatgacataaatcctccttttgaatgtcttcaatgacatctttgattgttttttcattataaaaattaataatgatattctgttcgtcttgctgataatgtgacatggtagttgcaatattacgagcaatttgacagtgactgccttcgtcgccagtaaatagacgtgtgtggtgttctttctctaagacaaaatgtttatataatgttgctagagagacatcagcactttgatcatttgctaaataaccgccatctttacctcgtattgtgtcaatcatttttaaatcgacaagttgagtcgtcacgcgtcgtaattgaacaggatttaaacaagttaattctgctaatgaactactattgaatttttctgaatgatgcttagttaaaaaagctaatacatgcacggcaatgttaaattctaaattcaatgtttctcacctcataattgtaactgtattagttacaattaaaaatcattttgctcaatgtgtcaatacttatgtttgaaaagtgttgaattaggtgtggttattgtgatgatttattgtttgaaagttgatgcattaacggtgagattgcacaattgaaattttaattatgtatgaactgatagatatgaaatgaatattgaaaatgagagcaataaaattttgaatgatgatgttgtgtgattgtataaacttattcgtattttagatacgttttgatatttcgcatgatgaggaaatacttttaacaactgatgacatattttaatagtgaatatattttgagatattaatatatttaatgttaaggatgttgtcgcaataaaattaaaatattgaaagataatttttattgattaattgcgaatatacaaagacaccattatatccatatgctaaaataagaaaaaaggcgacatgttatctcaatttacctgcatctagactcctttacataagaaataatcatcgccgagttttaaaattttacaactttgtagatgtaaaaagcatttgattttaaatagtttgaaaatcatatatttttgaaaaaggagcatgccgatgagtattgacatgtatttagacagatctcgaaaccaagcttcaagtgtggggaatttgagtcaaacaatgaattcaaattatgatgcgttggaaaaagcaattactcaatttattaatgatgatgcgcttaaagggaaagcgtatacgtcagctaagcaattttttagtacggtgttaattccattatcaacaagtatgaaaacattgagtgatttaacgaagcaagcttgcgataattttgtgtcacgttatacgagtgaggttgatagcatatctttaaaagaatcagagcttgaagaagatatcagatcattaagtcaacaaattacgcgatatgaaaatttgaataacaatttgaaaaagcatgcttccgataatcagcaagccatttcatcgaaccaacaaataatacgaacattaggtcaacaaaaacatgaattagaagagaagctacgcaaattgcgtgagtttaatcaaaaatcaccagaaatatttaaagaagttgaagaatttcaaaaaattgtccaacaaggacttacccaagcgcagaatttttggaacttttcaacaaatcaatttaatattccttcaggtaaagaacttgattgggccaaagcaagtcatgaaaaatatttgaaagttgctatggggaaaattgaacataaagcagagaaagaaactttaaataaagcagactttgctgttataaaggcatatgccaaagaacatccagaagacgatatcccgaaaagtatattgaaatatataaatgacaataaagacagtattaaaagagatataggattagatattacgtcaacacttttagagcaagacggtataaatgcaagtaaattcggtgtatttatcaatacagcaggtggagtgaaaggcccagcaggtccaaattcatttgtggaagtcaaacgtacatcaggtaatgtgtttatagaaaatggtagtaaatttgcaaaaggcggaaaatacctaggtaaaggtgttgctggtgtaggatttggtataggtatgtatgatgaccttgcaaatgatgataaaacatttggagaggcgttgtcgcataatggtatgacgcttgcagctggatctgcagggacagcagttggagctggattagcgacttttgttttaggaagtaatccagtaggatgggtgattttagcaggtttggctatgagtacagtatttgcattaggaacagatttaatttatcaaaataatatttttggattaaaagataaagtagactgggtagggcataaaatcgataatagtatagatgttgttaaaaaaactacagaaaaatccatggatagtgttgggaatgctgttagtgaagctaaaaatattattagcaatcatataaatccaatgaaatgggcgtggtgagttttgctttttaatattaaggttattaataaaaatccgagatataaagtcgttcaatataatgatgagtatttgttaattgatttagtaagcacttggcttgtatacttttttccttttattaattggttcattcccaaaaggtatgcaaaacttagtgagaaggaacttgaaaatttaaatgttgataaacaaaataaaaataatattttctggccagttactggtagttcgtttttatttgtagttattttacggaaatatgtacatacgtttgaagttcaattagataataagattttaatatctttatgttttataggatttataggtattgcagcattttacatttacttaaataaaaagcttaaactaaagatatatgatgataatctagataatgaaaatagggttatattagtgcctacttttaaagatggaagttttatagttttcacatatctattattaggaggttgttctatattatttttaatatggctaatgactataaaacctcaaaatctactggtatttattatgtggattattattacaatttttttctttctaataagcatgggctcaattagtaataaaaaggtttatgccaaacttaaaaagcaatagaaattactaaacttagattgtagttcgtaagttaagtaataaacaggaaaatagtatgttactaaaatacaaaacacttataaagtatctgaaagtgtattagatataaaaccaacgagacggaagtggagatattgctttgcgaggttagagttgtaaacaaaaatcccagatatagaattattaaatataaaaacgactatctgatgattgatttagtaagcacctggttagttttgttctttccgtttattaattggttaataccaaaaaaatatgtccaaatcagcagagaagattttgataatttaaatattgtcaaaccagttaaaaataaagctttatggccagctataggtagcatacttttatttggcactatgtttagagataaaatatatatacctgattctcatttagaaaaaaattgcgttattatcatttgttcggttttattattaagtattctagtgttttatatatatttaaatcagaaagtaaagttatctatctataatgatcggagtagcaatggaaaaattatgatttttccatcattcaagaatctttgctttgtactattttcttattttttctgtggtggattatcaatcatgttcttagatgttttgattagtttatctatccaaaatattatagtatttattgcttgggttattatgacaatgctatttttctttataaatatgtcttcaataatagacaaaaagattcatgttatatatttaaggtcatataaatattaattttgatacaaaagggcacaagtgttttgagaaacagaaacgataatatagctgtgtgaatttgttattaataggaagtgataattattgctttgtgaaaccgaaattatcaataaaaatccgaaatacagagttattaagtatgatgatgagtatttaatggtcgatgtaataagaacttggcttgtatacttttttccatttattaattggttcattccaaaaaggtgcgccaaaattagtagagaagagtatgaaaaactgaacactgttaagccagttaaaaataaaaatttttggcctgttgtaggaggaacaatcctactaggtgctacttccagaaagtacatacacttacttaatattcaattagaaaaaagatcggttatatttatatgcttcgttgtatttctatgtattttaatcttttttgtgcttctgaatcgaaaattaaaattgaaagttttcgataataaaaaagaagaacaaaaaataattttagtaccaacattaaaaaatgctgttcttatattatatggctatttgttgattggaggcatgtcaatattagctttaagcatgttgctgacattagaaaaccagaatttaataacttttatagcttggggtatggggttaatgttgtttttcttgatgaatataacactcattgtcaataaaacagtcaaagttataaaaaggtgaataaataactaattatattgtattggccgttcttcaaataaaaaataatttgaataaggtggaagtgataaacagtgctttgcgaatctagagtcattaatcaaaaccctaaatatagaattattaaatacaataatgaatatttcatggttgatttagtaagtacttggattgcttattttttgcccatgattaattggtttattcccaaaaagtacgcgaaaattagtagagaagaatttgaaagtttaaatattgtcaaacccgctaaaaataatactttctggcctgttgcaggatttgcagtgttattaacaaccttaacaagaaaatatatctatttgcttaacatccatttagaaaaagaaatagttatattaacatgctgtatgatacttctaggtgttttcgcattgtttatatatataaatacaaaattgaagttacatatttttgataaaaataaaagtaataacgaaaagatcatattaatacctacatttaaaaatatttgtttatccttatttgcttatatattatttggtggattgtcaacaatggctctgagtatgttagtaacttcatcccctcaaaatataatagaatttcttgctttaattggcatgactgcatgcttctttctactgaatatgtcatcggttctagataaaaaaattcatgttattttaaaaacaaataagtagtaaaattgattaacttaggtagtatcggatacttaaatgttggttcataaaaagcaatgattttaaatcgaggagctatcttagaacagggaaataaaacagccaaagttataaaaagtgaattaataactaattatattatgttagccacgcttcaaataaaaaataattagaataaggtgggattgataatcaatgctatgcgaatctaaaatcatcaataaaaaccccaaatatagaattattaaatataatgatgagtacttaatgatcgatataataagcacttggattagtttgttttttccttttattaattggttcatccccaaaagatacgtcaaaattagtagagaagagtttgaaaatttaaatattgtgaaacctgctaaaaagaatgttttttggccagttgcaggtatctctactttattcgcagttacattaagaaagtatacacatttacttgacactcaacttgatagaaaattagttattgctatatgttgtatcacatttatagggattttaacattttatgtacgcctaattaaaaaatcatctttaaatatttataatactaaaaataaaaggtcaaaaattatcttaataccaacactaaaaaatttttgtttaacattgtttagatatgctttttttattttatggacagtgattttctcatatgctctattatcaatgagttatcaaaacataatagtatattttgcttggattacagcaataatgggtttttttctagtgaatatagctttaattatagataaaaacattcatgtcatacttaaaaattaagtgaaagtactaaattcagattaaaaatatgaaaatatcagttaataaaacctttgatgacagtaacttgatagtatttgaatgtcttttgaagtatcgaaaaatgtattacacataaaattaaagggatgtggagacattgctttgcgaatctaaagttattaataaaaaccctaaatatcgaataatcaaatacgatagtgaatatttaatgattgatttggcaagtaattggattgtcttcttctttctatttattaactggctcataccgaaaacatatgtcaaaatcactaagaatgattatgaaaaattaaatattgtcaaaccagttaaaaataaatcgataggatggaccatattcgcgggtattgtgttacttggtggtactgtaagaagaaatacttatttatttgattttcaattagaagaactaattgtttggagcagctgtttcattgggtttttagagattatatttttttattgttatctaaataagaaattaacattaaatatttataatgaaagtaaaaataatgaacttaaattaagattattaccctcctttaaaaatatttgtttcacaattttttattacctatttactggtttcatgtcttatggggcattttacttgttggtatttgaaaatgtgcaaaatttaatcttatatgtttcttggcttttcatgactatgctatttatgtttatgaatatgcattcaattatagataaaaaagtacatatattcttaaagtctaataaatagttacaaatttagttagttttcaattgttaattaggggtggtaaacagtgctttgtgaatctagacaaatttataaaaatcctaaatatcgagttattagatataataatgaatatttcatggtcgatttagtaagtacttggattacttattttttccctatgattaattggtttttgcccaaaaaatacgcaaaaattagcgaaaatgaatttgaaaggttaaatatagtcgagcctgttaaaaataatgttttttggccggttgcaggaagttcagttctatttggaattatattgagaaagtacggtaacttctttaatgttcagtttgaaaaacaactagcaatcactgtattttttatcatgttaatagggatgttaattttttatttttatctaaataaaaaattaacattaaaaatttttaataccaacgtggttaataagaatagagttgtattaataccgactttcaaacaaggattgttaatagtttttgcgtactttttttaggaagcgcttcaatatttactttaaccattcttttgacgacagagtcacaaaatataataatatttttaacttgggttattatcacgatgtttttctttttagtgaatatggcttcgataggtaataaaaatgttcatgttattttaagaataaacgagtagtaaaaatgatcgaaattggtagtatcgcatatttaaacggtggttcaaaaaaatataatcatatcttaaatcaggaaaatagatagtaatgtttgaatataccaagtgaaaatgcccattgtgattgataaaggaaaaaactgttttaatttaaaaatgaaatatagagcgtgttattttgtatgatagctcttataacattggcgtttttaatccaatagtatggacggttttagctggttttgttgcggaatctgtttagacaattcttaaaaattggacttttcatactaataaatttggattaagagataaaactaattggataagacattaaatagacgctgtttaaaaataccacagaaaaagctgtagatagtgttggaacgatagttggtgaaggtacaaaaagtattggggatcatttaaaactaatgaaacgggagtggtaaatgttgctttgcgatgtcagagtcatttataaaaatccgaaatacaaagtcattcaacataacggtgaatacttattagtcgatttagtaagcacttggttcgtgtacttttttcctttcattaattggttcattccaaaaaagtacgcgataattagcgaagaagaatttgaaaatttaaatgttgttaaaccaaataaaaataatgttttctggtcagttataggaagttcggttttgtttggagttactttaaggaaatacatacatgtttttgatgttcaattagataagctagttgtaatgatattgtgtgctctcgctttaatttgtgttatagttttttattttaacttaaatagaaagcttaagttaaaagtgtttgatacaaatattgaaaaaaataagagagttatattaataccaacgtttaaacttggctgttttttagttttcggatatattttcgctggaagtttttcaatattttcattaattgcccttatgacaatcgaacctcaaaatataataatatttatttattggattatgatgacaatgcttttctttttgttaaatatgacttcgataggtaatgaaaaagttcgcgttataatgaaaaataattgattacatttaaaatattctaaatgttgtcgacacaatccttttaagacgctagtagaatttaaatgacttctaatgtatatgaaagtgtatcaatataaaaccaattgaaaagaagtggagacattgctttgtgaaactgaaaatattaataagaatcccaaatatagaattatcaaatacaaagatgaatatttgatgattgatttagtaagtacatggttagcactctttttcccaatgattaattggctgattccaaaaaagtacgtcaaaatcagcgaaaaagattttgaaactttaaacattgtgaagacagctaaaatcaattctttttggccagtggcaggaagtacggtcttatttggtgttatgttaagaaggtattcccatttatttatcgttaaatatgaatatagtatagtaattttaatttgttgcatcataatactaggtatttttctgttttttttatatttaaatcaaaagttaaagttacaaatctataatgaaaacaaaaataaaagcaataagataatcatatttcccactttaaagagtctttgtttatcaatagttttatatatttatttaggtggtggttcattctttactatttatatgttattgacgattgaagttcaaaatataatattatttataactttgtttgtaatatttttgtttttcttatttttaaatatgtgctcactatatgacaataaagttcatgtattatttaaatcaaatggaattgaaaagttttaataggaataataaacaaaggaatggtagtgataaatattgctatgtgaatctaaagttatcaacaaaaatcctaagtatagagttattaaatatggtgatgaatatttaatgattgatttagtaagtacctggttaactttatttcttcctatgattaattggttaattccaaaaaaaatatgtcaaaatcagtaaaaaagaatttgacgatttaaacattgtcaaacctgttaaaaataaagctttttggccagttgcaggtagtactattttgttcggagttacgtttagaaaatatattccttcacttaatattcaattagagaaaaacatggtgattgtaatatgttgtgcaatatttctgggtgttttaatactttttttatttctgaatcgtaagctaaggttggaaatttataataataactctagtaaagggaaaataattttatttccttcattaaaaaacttttgtttcacaatattttattattttttatttggcggtctttcaataatggctctaagtatgttattaactttaaatcctcaaaatataataggctttattggttggttggtaatgactgcaggtttctttctgttaaacatgtcatcgattattgacaaaaaaatttatgtattatctaaaactaacacggtggaaaaatgatggtttagctggatttactgcaggttctatttcggcaatacttgtatattggaccaatcaaaaaaatgaatttggaataaaagataaaaacgattggataggacataaactagacgttggtatagatgctgtagaaaaatctgcagaaaaaacagtagatggtgttgaaaatgtcatggtgaagcttcaaaaagtatttctaatcatataagccctaagaaatggagctggtaaatgttgctatgcgaatctaaaatcatcaataaaaacccaaaatatagaattattaaatataatgatgaatacttaatggtcgatataataagcacttggattagtttattttttccttttattaattggttcatcccaaaagaatacgtcaaaattagtagagaagagtttgaaaacttaaatattgttaaacctgctaaaaagaatgttttttggccagttgcaggtagctctgctttgctgggagttgcattaagaaaatatacacatttacttgacattcaacttgataaaaaattagttattgccatatgttgcatcacatttatagggattttaatattttatgtacgcctaattaaaaaatcatctttaaatatttataatactaaaaataaaaggtcaaaaatttttttaatacctacactaaaaaatgtttgtttcacattatttggatatattttatttggcggattgactatgctattcctagatgcactattatcaatgagttatcaaaacataatagtatattttgtttggattgcagttataatgggtttttttctagttaatatagctttaattatagataaaaacattcatgtcatacttaaaaaccaatagaaattaccaaattaaatttgcaatggctttaatattgtcgttcttaaatgtttttcaatttctgattcaaaagtacatgtaatttaaaggtcaacgagcaatcgcgctatatgcatatcaatttaagcaatacttattttaactgagttttatataacgttttcctattacaccgcttaaattcaagctctaattctaacatttggaagttgtattaaatcatgatagtgtgatagtggaaaagttataaagataaggagctgggtctaatgaagcaatttgtaaacttaggtaaatctgatgttgaagtgtttccaatcgcacttgggacgaacgcagtaggtgggcataatttatatccgaacttagatgaagaacaaggaaaagatgttgttcgtcaagccattaatcatggtattaatttattagatacggcatatatttatgggccagaacgatcagaagaattggttggagaagttgttaaagaatatccgcgagagcaaattaaaattgctacgaaagggtctcatgaatttgatgaaaatcaagaagtacatcagaacaatcaaccggaatatttaaaacaacaagttgagaatagtttgaaacgtctacaaactgattatatcgatttatattatattcattttccggataacaacactccgaaagatcaagcagttgcagcattacaagagcttaaggaacaagggaagattaaagcaattggtgtatcaaatttcacattagatcaacttaaagaagcaaataaagatggttacgttgatgttgtacagttagaatataatttattgcatcgcgaaaatgaggcagtattacaatattgtgttgatcaccaaatcacatttattccatatttcccattagcatccggtattttagctggaaaatatgatgagaacactaaatttagtgaccatcgtactacacgtcgtgattttaaaccaggtgtatttgaagaaaatgtgcgtcgcgtaaaagctttggaaagcatagctgcagcacatcaaacttcaattgcgaacattgtattagcattttatttaacgagaccagctatcgatgtgattattcctggtgcaaaacgtgcagaacaagtcgttgaaaatattaaagctgcagatatcgttttatcagatgatgagattcaatatatcgatgaactgtttccgattgaagactaaatgaattgtatttaatggtgatatatgtatctaatttcatcatgaattagccccgtatcacaaacgacgttatataaggcatgacgaaatttcgtcaaatttatataaaagttgtaagcgttttactattcggtaggcaaagcttatgatagtataattaggtaacgaaaaacacagatatttattaatcaaaagtgaggttaggctaaaatgattactgttttgtttggtgggagtagaccaaacggtaatactgcacaattaacaaaattcgctttgcaagatttagagtatcaatggattgacgtgacacaacatcagtttaaaccgatacgtgacgtgagacatacagcagagactattacttcatatgacgatgactatttgccgattctagataaaatattggctagtgatacaattatttttgcatcaccagtgtattggtatagcatttcagcaccattgaaagcatttatcgaacattggtcagaaacattacaagataaacgatatcctaattttaaggcacaaatggccgaaaaggattttagagttattttagttggtggagattgtccaaaaataaaagcgaagccagcaattacgcaaatgaaatatagtttagactttttaggtgccactttaaatggttatattattggaactgctgaaaagcctggtgacatcatgaaagacaactatgccttagcacgtgcaactgagtggaatagtatattgcaataagacatacctcatactaaacgaagtgattttttgcttcgttattttttatttttaattttaacggaaaatataaatatataaattgaatagacaatcattgtttattaagtattgagcaagttgtggtataatgccgttattaaaacttgttaataaggggagaaagtcatgttcaaggtaagacaagcaactgaaaaagatgttgttcaaattagagatgtcgcaactaaagcttggtttaatacatacttaaatatatacgctgcgacaacagttaatcacttgttagaagcttcatataatgaacatcatttaaagaaaagacttcaagaacaattattcttagtcgttgaagaaggtaatgacatcgttggctttgctaactttatttacggtgaagaattatatttatcagctcattatgttaaaccagaatcgcaacatacaggttatggtacagcattgttaaatgaaggattatcacgttttgaagataaatttgaaggtgtttacttagaagtagataataaaaatgaagaagcagtagcttactataaagagcaaggttttacaatcttacgctcttatgagccagaaatgtatggcgaaaagttagacttagcacttatgtacaaagcattttaagtaaattaaatattatattaaacgaaaaggaggggaataatgactaacgcatatgtagatttaaaattagtagaagaaaaagtttttaaagacccgatacatcgatatattcatgttgaagatcaattgatatgggatttaattaaaactaaggaattccaaaggttacgtcgaattagacaactaggaacactgtacctatcttttcacacagcagaacatagtcgctttggacattctttaggtgtgtatgaaatagttagacgattaattgatgagtcatttattggtcatgatgcatgggacaataaagatagaccgttggcattatgtgctgcattattacatgatttaggacatggtccattttcacatagttttgaaaaaatatttaatacagaccatgaagcatacacacaagcgattattactggagatactgaggtgaatgctgtattacgtaaagtggcgcctgagtttccaagagaagttgcggaagtaattaataaaacgcatcataataaattggtcatttcgatgatttcgtcacaaatcgatgcggatagaatggattatttacaacgtgatgcgtatttcacaggtgtatcatatggtgcttttgatatggagcgtattttaagattaatgcgaccttctaaagatgaagtactaatcaaagaaagtggtatgcatgcagttgaaaactttattatgagtcgttatcaaatgtattggcaaatttacttccacccagttagtcgtggtggagaagtgctgcttaataattgtttgaaacgcgcaaaacagctttataatgaaggctatgaatttaagttgcatccacatgattttattccattttttgaagagacagttacgattgaacaatatgttgaactcgatgaagcggtagttacgtattatttggaaaaatggacaaaagaagatgatgctattttaagtgatttagcaagtcgatttattaatcgagacttatttaaatatattccatttgatggctcaattattacaatatcagaactgcaagaactgtttgaagcaggtggtattaatccagattattattttgtgagtgaagcattttctgatttgccatatgactatgatcgaccggggtcaaatcgcaaaccgattcatttattaagacaagatggtacgattagagaaataagcaatcaatcattagtcattcatagtattacaggcattaatcgccaagactataaattatattatcctagagaaatggttgcaaagattaaagataagacaattagagaagctattgaaaatttgattaatgagcttaattaaacagggctaaaattgttatcgttaaatatggaggttatatcattgtctgagaaaaaaggctttaattttaatatcataaaaaatgaccctctagatggtcataaaggtacaaatattggttcaattagcttagacaatattgcaccagtttttatcgatgttgctaacaaagaagcatttattgatattggaggcatgcatgctcgtgccaaagttgaaaaaggtgtgaaatggattactgataaagctgctgttgaaggcgatgaagctaaagaatattggttgtgttgggtaacaacagaacgtaatgaacaaggaccatattacgctggtttaacagcgtgctatttattagtgaataaagcaattcgtcgtggttataaaagtatgcctgaacatgttaatatgatggataaatcaatgaaacatcatattatcatagatcaaattggtgacgagaataaagctattttaaaagactttttaatgaaccatgatgaaggtatgtggaagcattcttctgatgctttacatcaagcatttaattaaatattagaaactaaaatttcccaattaatctataaagatatgattcatttctcaatgacgacgtaaatcgtgaggtgaaaataatgtcttagattgattgggagtttttttaatttttttgaaattaaattaatctgtagttaataaaaaatttgaataactgacacatttttttgatcatagctatatactttgtgaattaattcacattataataagagtgaagataagagtattataaattatctttaaataaatatatgtgaagtaaaaattacacgttagcatatcgattatgtcatttcttttaacatattaactagggaaacgttaaaagttaacggttgatatctaactaaaaacaaggtcacagtagtatgttttaatctggcgtctattacaaataaaaattacatctataattattcgttttcttttttgaaagtaatagccaattaatatcatacatactggagtgactataaggaggacattattatgagagcagcagttgtaacgaaagatcacaaagtaagtattgaggacaaaaagttaagagctttaaaacctggtgaagcgttggtacaaacggaatattgtggcgtttgtcataccgatttacatgttaagaatgctgattttggtgatgttacaggcgttactttaggtcatgaaggtattggtaaagtcatcgaagttgcggaagatgtagaatcattaaaaattggagaccgtgtgtctatcgcttggatgttcgaaagctgtggaagatgtgaatattgtacaacaggtcgtgaaacactttgccgtagtgtgaaaaatgctggttatacagtagatggtgcaatggctgaacaagttattgttactgcagactatgctgtgaaagtacctgaaaaattagatccagcagcagcgtcttctattacatgcgcaggtgtgacaacttataaagctgtaaaagtaagtaatgtaaaacctggacaatggttaggtgtttttggtataggtggtttaggtaacctagctttacaatatgctaaaaacgttatgggggctaaaattgttgccttcgacatcaatgatgataaattagcattcgcgaaagaattaggtgctgatgctattattaattctaaagatgttgatccagttgcagaagttatgaaattaactgataacaaaggattagatgcaacagtggtaacttcagttgctaagacgccatttaaccaagcggttgatgttgtaaaagctggtgcaagagttgttgccgttggtttacctgttgataaaatgaacttagatatcccaagattagtgcttgatggtattgaagtagtaggttcacttgttggtacaagacaagacttacgtgaagcgtttgaatttgctgctgaaaataaagtaacacctaaagttcaattaagaaaattagaagaaatcaatgatatttttgaagaaatggaaaatggtactataactggtagaatggttattaaattttaaaaatatcaactgactatatagataaagaaggtagtgctctgaacactatcattataatcaaacacgaggttttcatgaaagatagtgaaaatctcgtgttttttggttttgaggtgttgtttgtattttataaaatggcttacatatatgaagcgttgattaagtatggaattgttaattaattgaacctatttagctttaagaaggcataacaagatgaccttattttatgctataatatttctattatgcgaagattaaggtgagtagtaaattggataaaaaagtaagtattcaaacaaagcaagtgttgaaacagcacaacgaaaaagaaaaatttgaatttactactgaaggaacttggcaacaaaggcaatctaactttattcggtatgtagaacaaattgaggatgcaacagttaatgttacaataaaagtggatgatgatagcgttaagttgattcgtaaaggcgacattaatatgaatttgcattttgttgaaggacaaacgacaacaactttttacgatatatcggctggacgaattccactagaagttaaaacattacgcattttacatttcgtaagtggagacggtggcaagctaaagattcattatgaattatatcaagataatgaaaaaatgggttcttatcaatatgaaattaactataaggagataggcgaatgaatattattgatcaagtgaaacaaacattagtagaagaaattgcagcaagtattaacaaagcaggattagcagatgagattcctgatattaaaattgaagttcctaaagatacaaaaaatggagattatgctactaatattgcgatggtactgactaagattgcaaagcgtaatcctcgtgaaattgctcaagcgattgttgataacttagatactgaaaaagcacatgtaaaacaaattgacattgctggtccaggattcattaatttttacttagataatcagtatttaacagcaattattcctgaagcaattgaaaaaggtgatcaatttggacatgtaaatgaatcaaaaggtcaaaatgtattgcttgagtatgtttcagctaaccctacaggagatttacatattggtcatgctagaaatgcagcagttggtgatgctttagctaatattttaactgcagctggctataatgtaacacgtgaatattatattaatgatgctggtaatcaaattactaacttagcgcgttcgattgaaacacgtttctttgaagctttaggtgacaatagttattcaatgccagaagatggctataatggaaaagatattattgaaataggtaaagatttagcagagaaacaccctgaaattaaagattattctgaagaagcacgtttgaaagaatttagaaaattaggcgtagaatacgaaatggctaaattgaaaaatgatttagcagagttcaatacgcattttgataattggtttagtgaaacatctttatatgaaaaaggagaaattcttgaagttttagcaaaaatgaaagaattaggttatacgtatgaagctgatggcgctacatggttacgtacaactgattttaaagacgacaaagacagagtattaattaaaaatgacggtacatatacgtatttcttaccagatattgcgtaccacttcgataaagtaaaacgtggtaatgacattttaatcgatttatttggtgctgatcatcatggttatattaatcgtttgaaagcatctcttgaaacgtttggtgtagatagtaatcgtttagaaattcaaatcatgcaaatggttcgtttaatggaaaatggtaaagaagtgaagatgagtaaacgtactggtaatgcgattacattaagagaaattatggacgaagttggcgttgacgctgcacgttatttcttaactatgcgtagtcctgatagtcactttgattttgatatggaattagcgaaagagcaatctcaagacaatccagtttactatgctcaatatgcacatgcgcgtatttgttcaattttaaaacaagcgaaagagcaaggtattgaagtgactgctgcgaatgattttacaacgattactaatgaaaaagcgattgaattgttgaaaaaagtagctgatttcgaacctacaattgaaagtgctgctgagcatagatcggcacatagaattactaattatattcaagatttagcttctcatttccataaattctataatgctgaaaaagtgttaacagatgatattgaaaaaacaaaagcacatgttgctatgattgaagcggtcagaattacattgaaaaatgcattggcaatggtcggtgtaagcgcacctgaatcaatgtaagaacatttatatacactccaacgtagagtttctcgaaagatactttgtgttggagtgttttttttaggtatgtgacatattggggaatgcttagtatgtgaataaggttaagaggaacacagttggatgctctgcacaactgcataagagagcctgagacataaatcaatgttctatgctctacaaagttataatggcagtagttgactgaacgaaaattcgcttgtaacaagcttttttcaattctagtcaaccttgccggcggggccccaacaaagagaaattggattcccaatttctacagacaatgcaagttggggtgggacgacgaaataaattttacgataatatcatttctgtcccactccctctaaaatggagggtgtaaatgttaggaactgatgaattatataaagttttatatgaacatctcggaccacaattttggtggcctgctgataatgacattgaaatgatgttaggtgcaattttagttcaaaatactagatggcgaaatgcagaaattgcattgaatcagattaaagaacatacgcattttaatccaaatcatatattagaactacctattgaaacgttacaatcattgatacattcaagtggcttttataaaagtaaatcactgacgattaaaacattattaacatggttagcacgacatcatttcaattatcaagagattaatgagcgatataaaggtggattaagaaaagaattattatctttgaaaggtattggaagtgaaacagcagatgtcttacttgtttatatattcggacgtattgaatttattccagatagctatacaagaaaaatatatgataaattaggatatgaaaacactaaaaattatgatcaattaaaaaaagtagtcacattaccaaatcattttacaaatcaagatgctaatgaatttcatgctctgttagatgtatttggtaaacattactttagagacaaagatataaagaattatgattttttagaaccttactttaaaaagtaaacgctgtgaagttagatagatgagtttatatgaaatataaaaaataatttactattttcttttagtatgtggacttatataataaatagaagcatataaagaaaaaaacagttgtttgtttgtgcagcaactgcataagagcccctaatcgctaaagctcaaggggagtaaaggaatacagttgtttgtgcagcaactgcataaaagcctctaatcactaaaggtgaagaggaacgcagttggatgctaaggcacaactgcataaaagcctctaatcgctaaagatgaagaggaacgcagttggatgctaccgcacaactgcataaatccctctaatcgctaaagcgaaaagtgggattaaaaaggagatgtgatagtgtgaagaaatcgttaattgcttttattttgatttttatgcttgtcctgagtggctgtggtatgaaagataatgataaacaaggtagcaatgataatggctcgtctaaatcgccgtaccatagaattgtttcgttaatgcctagtaatactgaaattttatatgaattaggattaggtaaatacatagttggtgtttcaacggttgatgattatccaaaagatgtgaaaaagggtaagaaacaatttgatgctttgaatctaaataaagaggaacttttaaaggcaaagccagatctaattcttgcgcatgagtcgcaaaaggcaactgctaataaagtattgtcatcattagagaaacaaggcatcaaagtagtgtatgttaaagatgcacaatcaattgatgaaacttacaacacatttaagcaaattgggaaattaacgcatcatgataagcaggctgaacaacttgttgaggaaactaaagataatatcgataaagtcatagattcaattcctgctcatcataaaaaatcaaaagtatttattgaggtttcatcaaagcctgaaatatatacagcagggaagcatacattttttaatgatatgttagaaaaattagaagcccaaaatgtgtatagtgacattaatggttggaaccctgtaacgaaggaaagtattattaaaaagaacccagatatattaatttcgacggaagctaagacaagatcagattatatggatatcatcaaaaaaagaggtggattcaataaaattaatgctgtcaagaatacacgtattgaagttgtaaatggtgatgaagtatcaagaccaggtccacgtattgatgaaggattaaaagaattaagagatgcaatttatagaaaataaaccattctaattatgccccttattgctacatgtaaaaaatacatgtttgagataaggggtttttaaaatatatttagtgaatgatagcaacgcgagtatgtgattgctataatgaatgtaattatcgatgaaagaaaagagaatgctatgacatttaataaagtattattgagctggatagtcatattgattataacaactagcatatatctattttggcagttgggcgatatcaatgatgtatttaaccagtctattttaatcaatgttagattaccgagattattagaagcattgttgacaggtatgatattaactgttgcaggccttatatttcaaacagttttaaataatgcattggcagatagctttacattaggattggcaagcggcgctacatttggttcaggattagcattatttttaggtttaacaacgttatggattcctgtattttcaataacatttagtttgataacattaataactgtattagtcattacgtcggtattgagccaaggctatccagttagaatcttaatattaagtggtttaatgattggtgcgttattcaattcacttctatattttttgattttattaaaacctcgcaaattaaatacaattgccaattatctgtttggtggttttggtgatgcagaatactcaaatgtatctataatagcaatcacatttatcattgcattgtttggtatatttatcattcttaatcaactaaagttattgcaattaggagaactaaaaagtcagtcactaggcttaaatgttcaattgattacatatatcgcgttatgtatagcttctatgataacggcgataaatgtcgcatatgttggcatcattggattcattggtatggtgataccgcaactcattagaaaatggcagtggaaacaatcattaggaagacaattggctttaaatattgtaactggaggacaaataatggttatggcagattttattggtagccatatattgtcaccagtacaaataccggcaagtattatcattgcattaattggtataccagtgttattttacatgctaatatctcagtcgaaacggttacactagcacacgacatttgctaaaataaaaataactataaacataaagagggcataagcgatggatttgaatcaaattaaagcagttgtatttgatttagaaggtacgttgttggacagagttaaatctcgagagaaatttatcgaagagcaatatgaacgatttcatgactacttaattcatgttcaactggcagattttaaaaaagcatttattgagctagatgacgatgaagataatgataaacctgatttatataaagaaatcattaaacgtttccatgtagataggttaacttggaaagacttatttaatgattttgaaatgcatttttatcgttatgtatttccttattacgatactttgtatacactagaaaagctatcgcaaaaaggctttcaaattggtgttatcgcaaatggtaaatctaagattaaacaatttcgattacattcacttggtttgatgcatgttattaattatttatcaacatcagaaacagttggttttcgtaaaccacatcctaaaatttttgaagatatgattgatcaactaggggtattacctgagcaaattatgtatgttggcgatgatgcgttaaatgatgtagctccagcacgagctatgggcatggttagtgtatggtataaacaagaagatgctgaaattgaaccactcgaagaagaagttgattttacaattacaacagtggaagaattattaaccattttaccaataaaaaatgataataaaggagaaaattatggatctatttactagaaaagatggaacatcgatacattacagtacattaggtgaaggctatcctatcgtattgattcatactgtacttgataattattctgtgtttaataaattagcagcagaattagcaaaatcatttcaagttgtgttaattgatttacgtggacatggctattctgataaacctcgtcacattgaaataaaagatttttctgatgacattgttgaattacttaaatatttatatattgaagaagttgcatttgtatgccatgaaatgggtggaatcattggtgcggatatttcagtacgttatcctgaatttacatcatcacttacgttggtaaatccaacatctattgaaggtgaattaccggaagaacgtttatttagaaaatatgcccatattattcgaaactgggatcctgaaaaacaagataaatttttaaataagcgtaagtattatcgtccgagaaaaatgaatcgattcctcaaacatgtcgtagatacaaatgaaatatcaactaaagaagaaattcaagcagttaaagaggtattcaaaaacgctgatatttctcaaacttatagaaatgtcgtagtaccgacaaaaattattgcaggagaattcggtgaaagaacaacaagattagaagctaaagaagtagctgatttaatccaaaatgcggactttgaagtatatcaagaatcaagtgcattcccatttgttgaagagcaagaaagattcgtcgaagatacagctgcatttatcaacaaacatcacgatgaaaagcatgtttaatttttagtgataagtgaaatataaaagtagtaattattatttgtaatataattgtaatatgactgttgttttagaaatgattgttgtataatggttgtgagcacaagacgatataaataaaaggagagagtgcttatgaaaaagctactaacggcaagtataattgcatgttctgttgtaatgggagtaggcttagtgaacactagtgccgaagcagcaagtggcaactctattgatactgttaaacaattaattaagggtgatcagtcattagaaaatgtgaaaattggcgaatctattaaagatgttttaactaagtacaaaaatccgatgtattcttacaatgaagatggaactgaacattattacgaattccatactaaaaaaggtatgttattagtaactactgatggtaagaaaaacaatggtaaagtaactcatatttcaatgatgtataatgatgctaatggtccaacatatcaagctgttaaaaattatgttggcaaagcagtaacacatacggaatatagcaaagttgctggtaattttggatatattgaaaaaggcaaaacgacttatcaatttgcctcagcaccaaaagataaaaacataaaattatatcgtattgatttggaaaaataataattaaattaatcgtgcttaaccgacaagttaaatcgcaatacttgtcggttattttattacatggcataatacagtgaatattaatttttatgatttgcgaaggggaaattaaaccaatacaataaataaagatgtttcattttaaaggagtactaccaatgcgtattaacgataaaattttactagaaaatatagaagattactttaatcataaaggtttatcaccgcatttgattgatgatattaaagagaaagtaattactgatataaaaaattctgaaaagaaagatcaagattatattgaatataaaagaaaatctccagcacaaatcatattaatgattcaaaggaatttgtttgctttacaaatgaatccagttattttctttattataaacttcattctcatatcctatttatatgataaacagtatgttcagtttcaagctattactggaatgagtctattttattgtttagtgatttttccaatgactattgttgtatacctaagggtgtctcaaaagaattacttgcgtagtaataaaatagaaatgattatgggtacaattatcgctatcatatccttgttattaattatattacaagcatttaatattacttggggcgttataccaattacaaattttggacatcaatttttctttttcattggtattattttagtaattgccggcatattttataagcgacttgagttttcgggaatcgggttattattttgtcaaaaaaccgtcgatgcaatgattcataatccacaatcagcccagattttttcattaattatatggatattattagtagttctagttatatatttcacaattagattatcttcacgtacaagattataaatatgataaaactattcacttgattaattgtattaattgagatgaatagtttttttattgttggaataacttttggtaatttataaataatttaaaaaaattgtttataaaatggaagcgtatatagaatgaaggttgggtatatagtttattgagggaggtgtcacaatgaataaagtcacaattaatcctcaaatccaattaacttatcaaattgaaggtaaaggggatcctataatattacttcatggattggatggtaatttagctggatttgaagatttgcaacatcaactagcatcatcatataaagtacttacttacgatttaagaggtcatggcaagtcttctaaaagtgaatcatacgatttaaacgatcacgttgaggatttaaaaattctaatggagaagttaaatattcatgaggcacatattctaggacatgatttaggtggggtagttgctaagttatttacagataaatatgcttatcgtgtaaaatcattaactaccattgcatcgaagaaagatgacttaatacacagctttactcaattgttaatacaatatcaagatgatatagcgggttttaataagtctgaagcgtatattcttttattttctaaattgtttagaaatcaagagaagacgatgaaatggtatcaaaaacaaagaatatatagcattaagtctgaggatgatagtgcggtggcaattcgttcattaattttgcataaagatgaacctatgtatttaaaaaaacgtacatgtgtacctactttgttaattaatggggaacatgatcctttgattaaagataagaatcattttaaattggaagcgcattttttaaatgttacgaaaaaaatcttcgaacattcaggacatgcaccgcatattgaagaaccagaagcatttatgaattattatttaaaatttttaaaaagcgtatcataatatgtgatatataaacctagggcataaagtccttaggcaatgtgaaaaagctgattactattcattatttgatagaaatcagctttttttgaaatgtatttgatatatactgctcgttatgcggctatcttccttatattaagtgccattagtgcaaaacctcttaacaattaggtaaaaagagcataaaaaaaggaagtttaatagaatgtatcatctatcaaacttcaccaaattgcgctaaacaaaattatagttcaatttcgttgtttgcttcagtgattcgtttatttactcgactcaataatgattcgatttttttacgttgttgtgcattaacaagaattaatacagttctttcatcatgctcattacgttttttatcgaagtaatcttcttgagataaaattttaactgctttaacaacttgtggttgtttgtagtttaaatgattaataatatctttaagatagtattctttctctttgttttcgctgatgtatgtcaatacagcgaattcttcaaagctaattgaaaattcctttttaattaaactttttaatttgtcagcataagtgaccattgataacaactcaaagcaatcattgatttttgtaattgccatgtttaaaacctccctatttgatgcatcttgctcgatacatttgcccgataatatattgatatctaatctttatttattatagatatgttagtcataattttgcattaaataagttttattaaatatatttaatgctctattatttagttaattataactaattaaaaatgagaagtaaacaaaaaagtgtttataaaacaaattattcattagacacagtgattgtatttctgggttagcatttggtttagtcaaaaatatcagcattttttataatttaccttaatttaatcgacaatacaaggtaatttatttaatgaaacgatttagcgcaattaaatgtttcgatattcaatgtgtgtctaaagagattctttgttatagcttaactcttccaagttaacttcttctactatttatacccatttttcagaattttatcactaaaaatgaaaaatttttataatttttttaatttagtaattctcagtgcagttttaatgataagaaaaacacattaatttagtgattaaaaccaatctatagcacgttaaagtgtctatacgttattccgattgataacgggtaacaaataatagaaagtacgataattgatcatgcattaaagcacttttatttttcaaactcgactcaatgaattataaaaagttgtgcattttgacttatttttaattaattgaataaccaactatgaaatattagcacgaataacataatttttgctattaatttggtgtaaattattaaaaaataacattaatttaggtcttaagaatgagttgactatcgaatttgctaaattaaaatttgttgtgtcaaagcatactacccaaatcaacgcttttctaaagatttttagaccacaaaaaaatagcttatcacttttaaaaataattacaagttaaaatgataagctaaaagttaatttaaaataatcttaaaagtataatgcctgtcaaaatacataatagaccaatagtttttctggatgtcattgctattttaggtgaaccaaataatccaaagtgatctatcaatatgcccattagaatctggccaaacatcccaataagtgttgttaatgctgcacccatatgaggcattaagataatgttagctgttacaaaagccatgccaagtataccgccagtaaaatagataggctttaatttaccgaattttaaatgacttgtttttagttttaaagaacgattaaaaatagcggttaaaatcaatagcgctattgacccaattgtaaatgatactaatgatgcaaaggctggtgaatgagtatgactagctaaagcactattaattgtcgtttgaataggtggaaagaaaccaaaaataaatcctaatagaagccaaaacagtaaatacttttgatcagttagtaataaattattcttgttaaattgattcattatgacgatgccgacaatgagtaacaatactccaattgctttaattaaattaaaatcatgaattgtagcgccaaataatccaaatgtatcaataatgacacccataataatttgacccgcaactgttgcaattacagttaatgttgcacctaattttggcaataacaataaattgccagttaaaaagctaaccccaagcaaaccaccgactacccatgtgtagttaaatgattgattattgtaaaagtgaatagtaaatacttctggattgataatgatatttaaaataattaaacaaattgttccaactgaaaatgaaatgaatgaagtatagaaaggcgatttagtatacagtgatagtcttgaattgacagatgtttggataggaataagcattccaactaggacaccaatgatatagaaaagaagcatatgaataaagtctcactttccaaagttaataataaaatcatatatttacattatcattatagagaaaatatacaactcatttacaataatgttgaaaaaaacaggacattattacaacaaaatcaccctagacaatcatgatgaaagtctagggtgttagtatttatactaaattaattgcgctttctttatatctatttcttatcttcaaataaaacagttgttgttttatcaataatttgagcagaatgtactttggtgatagtaccactatttgactttataatatttaaatctactaatgcattcatactatcacgtgcaacttgctcggtcactacgttgtttaattgtggtaattgcagttttacaggcttgtctagtgaagatttaaaacttaattcaagtgttttagtcatgaatatgtcctcctgattaaattgataaagatttgatgagttcgatattgctatatgtttctccagtaagtcgctcaataagtttgctgaatgttttaatttggtcgtttgatgcatcagggttaatgttagcgaatcgacgcttaaattctgtttgtttgccgttagcgtctactttagtaaatgataatacaatagtgatgtggtttattttactcatattttaaaacctcctttcacactatatatcgaaacaaaataataaaatggctaattttattttctatgtttaaaatctataaaaaaggcaatagatatatgtaactaaaatataatatagctatgattaagacacttaaagcaaggggaggttgagtaatgaataaagtagaagcgattaaatttaatgatgatattgttaaaatgtatgaagcgctcaagataaaatctgaacgtgactatttattctttaagttagctatacatagtggattgaaagtatcagaattattaacaattacagtctctcaagttaagagactaattgaaaagtgtacgttatcagaaatgtgtaaagcacattttcattcgttgattaaaattaggttaccagaaacattatcgaaagaactacttcaatatatagaggacaggagtctttcgaatgaagacgttctttttcaatcactacgaacaaatcaagtattatctagacagcaagcatatcgaataattcaccaagcatcaattgaagctggtatagataatgtaggactaacgacattgcgtaagacatttgcatatcatgcttatcaaaaaggtatacttataccagtcattcaaaagtatttagggcatcaatctgctattgaaacactaaattttatcggtttagaaaatgagtgtgaacatagtatttatatttcattacaattatagaaacaaaggaggctaataatgagtttggtttatttattaattgctatacttgtgattatggcgatgatacttctaatgtctaaacgtagagcattggctaaatatgccgggtacatagcgttggttgcacctgtaatttcatctatctattttttgattcaaataccatcagtagctaaactgcaatatctttctacctctattccatggattaagacattagatattaatttagatttacgtttagatggtttaagtttaatgttttctcttattatttcacttattggaattgcagtattcttctatgcaactcaatatttatcctctcgaaaagacaatttaccaaggttttatttttatttaacgttatttatgttcagtatgattggtattgtattatcagacaatacgatattgatgtacattttttgggaattaacgagtgtatcatcatttttattgatttcatattggtataacaatggtgacagtcaatttggtgcgattcaatcatttatgattacagtatttggtggattggcgttattagttggttttattatgctgtatatcatgacaggaacgaataacatcacagagatattaggacaagcagatcatattaagaatcatggattgtttatccctatgatttttatgtttttattaggtgcatttacaaaatcagcacaatttccatttcatatttggctacctagagcaatggctgcacctacacctgtaagtgcttatttacattcagccacgatggtaaaagctggtatctttttattacttcgatttacaccattattaggtcttagcaatatgtacgtatatatcgttacgtttgttggtttaataacaatgttatttggttcaattacagctttaaaacaatgggatttaaaaggtatcctagcgtactctacaatcagtcaacttgggatgattatggctatggtgggtataggtggcggatatgctcaacaccaacaagacgcaatagcatctatttatgtatttgtattatttggtgcgctatttcatctaatgaatcatgccatctttaaatgtgcgcttttcatgggagtaggtattttagatcatgaagcaggttcaagggatatacgaattttaagtggaatgcgtcaactatttcctaaaatgaatctagtcatgacgatagcggctctatctatggctggagtaccatttttaaatggatttttaagtaaagaaatgtttttagatgcattaacacaaactggacaattatcccaatttagtttgatttcaatgatagctatcgtgtttgttggtgttattgcgagtgtttttacattcacatatgcactatacatggtaaaagaagtattttggacaaaatatgattctaaggtttttactaaaaaaaatatccacgaaccatggttgtttagtttaccatctcttatattaatggtgctagtacctgtaatcttttttgtaccaaatatatttgggaaggggattatcgttctagcattaagagctgtatcaggtggtaatcatcaaattgatcaattggcaccacatgtttcgcaatggcatggatttaacataccgcttcttttaaccatcatcattattttattgggtagtgtactagcaatcaaagtagattggaaaaaagtgttcacaggtaaaattagacagatttcagtttcaaaaagctatgagatggtatatcgacattttgaaaagtttgctacgaagcgatttaaacgtgttatgcaagatcgtttaaaccaatacattattatgaccttaggcatatttatgattatcattggatatggttatattcgaattggacttcctaaagtacatcagttacatgtttctgaatttggggcattagaaattatattagcaatcgtaactgtcacaattggtatttctttaatttttatacgtcaacgactgacaatggtcattttaaatggagtcatcggatttgttgtgaccttattctttatagcaatgaaagcccctgatctagcattgactcagctagtagttgaaacaataacgacgatactatttattgtcagtttttcaagattaccaaacgtgccaagatctaacgctaacaaaaaaagagaaataattaaaatttctgtatcactcttgatggcacttattgttgtatcattaatttttattacacaacaaacagatggtttatcatcaatatcagacttttatttaaaagctgacaaactaacaggtggtaaaaatattgtaaatgcgatacttggtgactttagagcattagatacattatttgaaggattagtgttaattattactgggctaggtatttacacattattaaattatcaagatcggaggggacaagatgaaagagaatgatgtcgtgttaagaacggtcacgaaacttgttgtatttattttattgactttcggattctatgtcttcttcgcaggtcataataatcctggtggtgggtttattggtggtttaatatttagttcagcgtttattttaatgtttctggcttttaatgttgaagaggttttagaaagtttaccgattgattttagaattttaatgattattggagcattggtatcatctattactgcgataatacctatgttttttggaaaaccatttttgtctcaatatgaaacaacttggatacttccaattttaggacaaattcatgtaagtacaataacactttttgaattaggtattttattctcagttgttggtgttattgtcacagtgatgttgtcgcttagcggaggtcgatcatgaatttaatattattactagttataggatttttagtgtttataggaacatatatgattttatcaatcaatttaattcgtattgtaatcggaatttcaatatatactcatgctggtaatctcattattatgagtatgggaacgtatggttctagtagatcagaaccactaataactggtggaaaccaattgtttgttgatcccttgttacaagctattgtactaactgcaatagttatagggtttgggatgactgcgtttttacttgtacttgtttatagaacttataaagtaacaaaagaagatgaaattgaaggcctaaggggggaagatgatgctaagtaacttattgattttaccaatgttattaccattcctttgtgccttaatccttgtatttttaaaaaataatgatcgtatttctaaatatttatacttaggtacaatgactatcaccacaattatttcattaatgctattaatttatgttcagcgtcaccgtccaattacgctagactttggaggatggtcagcgccctttggtatacagtttttaggagattctttaagtttaattatggttacaaccgcttcgtttgtgattactttaattatggcatacggatttgggcgtggcgaacataaagcaaatcgttatcacttgccatcgttcatattatttttaagtgttggcgtgataggctcttttctaacatcagatttatttaatttatacgtcatgtttgaaattatgttactagcgtcatttgtactcattacacttggacaatctgtagaacaattacgtgctgcaattatttatgttgtcttgaatattattggttcatggctattcttattaggtataggtttactttataaaacagtaggtacattaaacttttcacatattgcaatgcgtttgaatgacatgggagataatcgcactgttacaatgatttcattaatcttcttagtcgcatttagtgcgaaagcagcgctggtcctttttatgtggctacccaaagcctacgctgtgttaaatactgagcttgcagcattatttgcagcgttaatgaccaaagtaggggcctatgcattaattcgattcttcactttactatttgatcaacataatgatctcatacatccattgctagcaactatggctgctataactatggtcatcggcgctataggtgtcattgcttataaagatattaaaaagattgcagcttaccaagtcataatctcaataggatttatcattttaggtttaggaacaaacacgtttgcaggtattaatggtgcaatattttatttggtaaatgacattgttgtaaaaacattgctattttttattattggtagtttagtttacattacaggctatcgacaatatcaatatttgaatggcttagctaaaaaagaacctttatttggagttgcgtttattataatgatttttgctattggcggcgtgcctccatttagtggctttccggggaaagtacttattttccaaggtgcattgcaaaatggcaattatattggactagcgttaatgattattactagtctaattgcaatgtacagtttatttaggatacttttttatatgtattttggagataaagatggggaggaagttaattttaagaaaatcccgctatatcgaaaaagaattttaagtattttagtagttgtggttatcgcaatcggaattgctgcacctgttgtgttaaatgttacaagtgatgcaactgagttgaacacgagtgatcaattatatcaaaaacttgtaaatccgcatttgaaaggagaggactaaatgaatcaaatagttttaaatattatcattgcattcttatgggtattatttcaagatgaagatcattttaaattctcgactttcttttctggatatctaattggtttaattgtcatttatatattacacaggtttttcagcgatgatttttatgttagaaaaatatgggtagctattaaatttttaggtgtttatttatatcaattaataacatctagcattagcacgattaattatattctttttaaaacaaaagatatgaaccctggattactttcatatgaaacaagactaacaagtgattggtcaataacatttttaacaattttaattattataactccagggtctacagtaatacgaatttctcaagactctaaaaagttttttattcatagtatcgacgtgtcagaaaaagaaaaagatagtttgttaagaagtattaagcattatgaagacttaatattggaggtgtcgcgatgatacaaacaataacacatattatgattattagttcactcattatttttggaattgcattaatcatctgtttatttagattaatcaagggacctacaacagcagatcgtgtcgttacatttgatacaacaagtgctgtcgtaatgtcaattgtgggtgtgttaagtgtacttatgggcaccgtttctttcttagattcaatcatgctcattgccattatatcttttgtaagttctgtttcaatatcacgctttattggtggggggcatgtgtttaatggaaataacaaaagaaatctttagtcttattgctgctgtgatgttgttgttaggtagttttattgctcttattagtgcaataggtatcgtgaaattccaagatgttttcttaagaagtcacgctgcgacaaaaagttcaactttatccgtgttattaactttaatcggtgtattaatttattttattgtgaatacaggatttttcagtgtgcgtttattactgtcacttgtttttattaatttaacttcaccagtcggcatgcacttagtcgctcgcgctgcttatcgcaacggcgcttatatgtatcgaaaaaatgatgctcacacacatgcatcaatattattaagttcaaatgaacaaaactctacagaagcattacaattacgtgctgaaaaacgagaagagcatcgtaagaaatggtatcaaaacgattgaagtgttggctaaattgttaagcataacaatgcttttgaaaatctgttttcaaaattaatcattaaaagagtactttgaaattggttagtcgattttaaggtgctcattttttgtattataagttaatgttgttatgtgaaagcaagttgtttatttatacaaacaattagtgataaaataaaattaaataattgcaaatttaagtactgcaatcgtagacatatatctatattaaagtgcttttgtggtcgctaactcaatttatcctctaaagtataattacaacgagatgtgatacttaattttcaattaaacaatactttttagagaggtgaaagtttggaaatatttgaaacaattcttatatttatagctgttgtgatactaagttcgtttgtccatactttcatacctaaagtacccctagcatttatacaaattttcttgggcatgttactatttattaccccaatccctgttcaatttaattttgattctgaattgtttatggtaacaatgattgcgcctttgttatttgtagaaggtgttaatgtttctagagtccatttaaggaaatatattaagccagtgatgatgatggcattaggattagtcattactactgtgataggtgtaggtttatttattcattggatttggccagatttacctattggagcagcatttgcaattgctgccattctttgtcctactgatgcagtagcagtgcaagcaatcactaaaggaaaggtcttgccaaaaggagcaatgacaattcttgaaggtgagtcattattgaatgatgctgctggtattatttcatttaaaatagctgttggagtattagttacaggtgctttttcacttgttgatgctgttcagttgtttttaattgcatcaattggtggcgcagtggttggtttacttataggtatggcattagtaaggttccgattaacattgatgcgtcgaggatatgaaaacattaatatgtttacaattattcaattgttaacaccatttgttacgtatttaattgctgaattgtttcacgcatcaggaatcattgcagcagtagttgcaggacttgtacatggtttcgaacgtgacagaattatgcaagtacgtacacaactgcaaatgagttacaatcatacatggaatatactaggttatgttttaaatggctttgttttttcaatattaggatttttagtacctgaagttattattaaaattatcaaaacagaaccgcacaatttaatctttttaataggcatcactattgttgttgctttagctgtctatctatttagatttgtttgggtttatgtcttatatccttatttttatttagccatcagtccattccaaaaaatgatgactaaaaatgatgatgataatccaacgactgagaaaccaccaaagcgaagtttatacgctttaattatgacgttatgtggtgtgcatggaacaatttctttagcaatcgcattaacgttaccgtattttttagcagggcatcatgcttttacgtatagaaacgacttattatttattgcatctggtatggttattattagtttggtagttgcgcaagtattattgccattattaacgaaacctgcacctaaaacagtaattggcaatatgtcgtttaaagttgctagaatttatatattagaacaagttattgattatctaaatcaaaaatctactttcgaaacaagttttaaatatggtaacgtgattaaagaatatcatgataaattagcatttttaaaaactgtagagaaagatgatgaaaactctaaagaattagaacgtctacaaaaaattgcttttaatgtagaaacaaaaacattagagtctttagtagatgaaggacaaataacgaatagtgtacttgaaaactatatgcgttatgctgaaagaacacaggtatatagacaagcatcattaataagaagaatgattgtattattacgaggtgctttattaaaacgaagagtacaaacgagagtgaactccgcatcttcacttagtgttacggataacttaatggaattaaataaaattaataaattagtccattataatgtggttagtcgtttgtctaaggaaacaacaaaagataatacacttgaagttggaatggtttgtgacggttatttaatgcgaattgaaaacttaacaccatcaaatttcttcaactcagcaagtgaagatacgattactaaaattaaattaaatgcattgagagaacaacgtcgcattttacgtgagttgattgatacagatgaagtatcagaaggtacagcgttaaaactaagagaagccatcaattatgatgaaatggttattgtagatagtatgacgtagttcctaattatgctaaaagggattgatgaaaaactgaagggcttttcatcaatcccttttattttaggggaattgaatagatagttttaaactatacgaattattaatatttgagatttaattgaaataagttttaaaaattggaggagatagattaagcgaagtcatttaaaggtgaagttaagtgtattcacaaaaaatagccacactcatatgacatcggatgagtgtggcttaaggatctatggggggaggaaaccatagatgtttactttgataggccagattaaatatcaaagtatgcgattatttatagcttgatgcaaaagtggtatgcctattaaaagttactgcacatagcttttaatattccgttcaaaggaaaggggcatacaattgaacaatctgtaatagtacttttaaccagctatgctaaaagtctagtagggagaacagttgtccaatcacataagaacctctaacttcgttagtacgattaagaaaagctttttagttagtatgtaatacaatttattgacgcgcgtgaatctcttttataagagtgtgtagggaatggcgttgtataaattgtattagaagaacttctaacgcatctctgtggttaaaagagatgaagggaacgacagtttaattaaaactgcataagaacttctagcttttctctctcgttcaaagagaagcagctgttcgcagtttaatcaaaaccacataaagcttttaactttactctttgatttaaagagtgataaatgtttacagtttaattaaaactgcataagaacttctagcttttctctttcgttcaaagagaagcagctgttcgcagtttaatcaaaaccacataaagcttttaactttactctttgatttaaagagtgataaatgtttacagtttaattaaaactgcataagaacttctagcttttctctttcgttcaaagagaagcagctgttcgcagtttaatcaaaaccacataaagcttttaactttactctttgatttaaagagtgataaatgtttacagtttaattaaaactgcataagaacttctagcttttctctttcgttcaaagagaagcagctgttcgcagtttaatcaaaaccacataaagcttttaactttactctttgatttaaagagtgacaaatgtttacagtttaattaaaactgcataagaacttctagcttttctctttcgttcaaagagaagttctaataccaccatatcgtgcgatcgggaacggtatatatattaataggagggtaatatatatttaacgcacgatatgggactattagccttcgactttgttatgttgatgtgtggcctaaaatattggagataccaatattttaggttgcatcaacatcaattcatcttacttcattaaaacacagcgtgttatttcatgcttccgtgtacagtttcaatatttgatttcatcattttgtagtaagagtcacctttagtgccttctttaccgattgaatctgtgtacacttcaccaaagatatctttcttcgtttcttcagataaactttccattgctttcttatcaacacttgtttctactaataagtgttttaatttgtgctttttaacaaactcaatagcttgtctcatttgttcaggtgtaccttgtttttcagtgttaatttcccaaatataacctggtgtaataccgtattgttttgagaagtacttgaaggcaccttcacttgtaatcatggcacgttgttcttttggaatgtcattaaatttgtctttactgtctttactgtcattatttaatttttccaattgagcaatgtatttgttaccttgcttttcataatctgctttatgttttttgtcgttatcgataaatgtttgttgaattgtttttacgtatttaataccgttatctaaacttaaccatgcgtgtggatcttgtttatctttgttgccttcttcaccgtttaaatagataggtttaacatcttttgatactgcgataacttttttatcttttaatgatttaccagcctgttctaaggctttttcaaaccaaccgttaccagtctctaaatttaatccgttgtataaaataacgtcagcgtcagttaactttttaatatctttaggtttaacttcatattcatgaggatcttgaccaacaggtacaatactatgaatatcgacgttgtctccaccaacatttttagccatatcatataaaattgaattcgtcgttactacttttaatttgccatttgacttatcactgctttgtttaccaccagtaccacatgcagcaactagaagtaataaggctaataataaaggtactaattttttcatgttaaacttcctcgtttctttctattcgtaaattttgtgaaaaataatgtgatgatataaattacaaacgtacaaagtacgattgtcgcaccactaggaatgttgtaaatatagctgtaataaagtccgacaattgaacttatgacacttattaaacttgctataatcatcattgagtatagttttttactaattaaaaatgctgtagatgcaggtgtaattaataatgcaactacaagaataatacctaccgtttgaatacttgctactgttactaatgagagtaacaacatcacaaagtaatgtaataacgtcgtatttagaccactcattctactaaacgttggatcgaatgtagaaatcattaatggacgatagaaaataatgattagaataaggacgattgaaccaatcacaatagttgttaaaaatgcactatttgtgattgccagtaaattaccaaacagaatatggtacaaatctgtcgtagtgtttattaagctaataataataatccccgaagctaagaaagcggtaaaactaattccaatagcggcgtcaggtttcgttttactactagatgtgatataaccgataaaaatacttgcgatcataccagttataagtgcgcctacaaacattggaataccaaataagaatgatagggcaacaccaggtaatactgcgtgactcattgcatctcccattaatgaaagaccacgtaatacaattaaactaccaactgtaccacaaactatccctacaataattgaagttatcaatgctcgattcaagaattgatatgtaaataaatgttcgacaaactctaacatgttatattgctcctttgactagggtcactacagtcagtgctactcataaatgtttcgtttaagcgagtgacactcatagcctcttcactatcaccaaagtatcgtaatgtttgatttaatagaataatgcgatcaaagtattgctttgcttttgatagatcatggtggatgataagaataagttttccttgttgttttaagttctcgatttttgtcatgattaatttttcgttactaaaatcaattccgacaaacggctcatctagaaaataaacttcactttcggacatcaatgctcttgctactagcacacgttgtaattgtccaccacttaattctgaaatttgtcgatgacgtaaagattctaattctaaatcgcttaataactgtttgagtttatcccttgctgatttattaggtcgtctaaaccatccaatttctttgtagcaacctgataaaatcacttgttccacacttataggaaaatctaaatcaatatgtgctttttgtggaatatatgtaatatgttgcagttgttgttgtataggtttgttatataacaatttagtaccggtagcattaaattcaccaattaaagacttgataagggaagatttaccagcaccattcgggcccatgataccaattatttcgccgcgtactggtatcgataaggaaatgtttttaagtacatgcttattacctaaaaacagatttaaatcttttgtttctaacaaacgtttatacctcctaattaaaagtttaggctaacctaattaattgtataataaactgagaatatttatcatgtcaagtaaattcgtgatataatatagacaatgtatgtgaggtgaaagtatgttaactgaagaaaaagaggactatttaaaggcaatccttacgaataatggcgataaaaactttgtgacaaataaaatcttatctcaatttttaaatattaagcctccatctgtaagtgaaatggtaggacgtcttgaaaaagcaggctatgttgaaacaaaaccatacaaaggtgttagattaacagaggatggtttaacgcatacgcttgatatcattaagagacatcgactattagaattatttttaatagaaatattgaaatataattgggaagaagtacatcaagaagcagaaattttagaacatcgaatttcagatttatttgttgaaaggctggatagcctgttaaatttcccagaaacttgcccgcacggcggtgtgattcctagaaataatgaatataaagagaaatatataacaacgattttgaattatgaacctggtgatatcgttacaatcaaacgtgtgagagataagaccgatttgctaatatatttgtctagtaaagatatttctattggtaatgaagtggaaattgtatcgaaagatgaaatgaataaagtaattatcattaaacgtaatgataatgtaattattgtcagttacgaaaatgcaatgaacatgtttgctgaaaaataaaataaagaagccataaagatatccatgattgaactgataaagacatatggataattgctttaggcttcttttttattagttaatttatcaagtgagtatatttgagtaaaatattcactgcataaagattgaagataatccagattgtactataaatgaagataggtacatgactgagttctttaagtgcactaccatcccactgtggactcggacgctggaaagtcaatttagcaatcgtccaactagattgtagaacttcgcctaataatacacctaaaatatattgataactcattgtgacaagtagttgaatttctactatattttcatcttttaatataaaatacaacatgatagaaattaaagttataacaacaatgggtgagccttttctagatgttaaaattaaaaaataaataaatatcaataaataggtaaatataaagaaactaggtatctgataatggctcgacgctaaacctatcaataacataataggtggcataaaataaccaccaatcgttgtaagccattggcctgctagatgtctagattgtgtaattgcgaatccttgttgtaatgtctgttgtcgctctcgtggacttgttacaatgactaaatcttttgcacggccaccagcgagtttattaaacagtacatgaccaaattcatgtgttaaaacagggatatagtttaaaatgacatctaaatagttcaaaacaggcttatgtctatattgatgaatagcaatataacaagctgcaacaataacgataatgtatatattaagttgaattgtcgtattaaaaaagtttgataaataattcattgttaacctcatataagatattaatttaaagtttgcttatcacttattataaatgatattggcatcaatagcgttagactttagacttaccttagttaaactaattttaatttttgaaaaggtgaatatgtgttaaaataaagcaaaatcatttcgatataaataggatgaatataaatactgttaatattgattacactaacataataatgaaataagataggagattcctgttatgactgttgaagaaagatccaatacagccaaagttgacattttaggggtcgattttgataatacaacaatgttgcaaatggttgaaaatattaaaaccttttttgcaaatcaatcaacgaataatctttttatagtaacagccaaccctgaaatagtgaattacgcgacgacacatcaagcgtatttagagttaataaatcaagcgagctatattgttgctgatgggacaggagtagtcaaagcttcgcatcgtttaaagcaacctctagcgcatcgtatacctggtattgagttgatggatgaatgtttgaaaattgctcatgtaaatcatcaaaaagtatttttgctaggggcaactaatgaagttgtagaagcggcacaatatgcattgcaacaaagatatccaaacatatcgtttgcacatcatcacggttatattgatttagaagatgagacagtagtgaaacgaattaaactgtttaaacctgattacatatttgtaggtatgggattccctaaacaagaagaatggattatgacacatgaaaaccaatttgaatctacagtgatgatgggcgtaggtggttctcttgaagtatttgctggggctaaaaagagagcgccttatatctttagaaaattaaacattgaatggatatatagagcattaatagattggaaacgtattggtagattaaagagtattccaatatttatgtataaaatagccaaagcaaaaagaaaaataaaaaaggcgaaataatcatgatgacaaaaataaaaccgaggaaatccttaaatggagattctcggttttttcggtttatttaataacgaagcgggactcatcgagtttgtttctaaattctttttgttcggctttggatttctttttaaaatcgttaaggaaagcttcatatttaggtaatacatcatcaagttcaccgtaatcttttaactttccgccttcaatccaagcaatcttagtacaaaattgtctcacttgtcctaagttatgactaacgaaaaagatggttttgttttgctctttaaactcgtaaattttatctaaacatttttgtgcaaaagtttggtcacctacagataaagcttcgtcaatgactaagatatctggattaactgtgatattaattgaaaaaccaagttttgcacgcataccacttgaatactttttaactggttgataaataaactcaccaagttcactaaattcaataatcttaggtgtcatcgctttaatttcttttcgcttaaagcccatacataacattttaaattcgatattttcaatccctgtaagttgtccactcaagccagcactaattgcgataacgctgacttcaccattacgatccactttgccaacagtaggcgacaaagaaccgccaatgatattgctcaacgttgatttgccggaaccattgatgccaacaagccctatgacgtcaccttcatatgcttttaaactaatgtcatctaaagcgaaaaatgttttgtttttatgtttgggaatgagcgcatctttcatacgttctttatttgtacgataaatacgatattcttttgttacatttttaatgtttaccgaaacgttcatttgtagaccttccttattcacatttatctagattataatatactactcaacagttgttaaattttaaaacctgttgtaaagtgtatagaagattttgttattatcagagtgggtgttttgacacaaaatgttaatcatcaatgataacaatgatatttaaaaactaaacttatttcaacttacatgattgtatactataatgtatttgtaataaactaatattttaaagaactagacaataattttgatagcatccatgtatagtgatagtatttacaacaattattataatactatttagttaagtagagaaatagttaaacatttgaaagtgtggtttaatggaatgtcagcaataggaacagtttttaaagaacatgtaaagaacttttatttaattcaaagactggctcagtttcaagttaaaattatcaatcatagtaactatttaggtgtggcttgggaattaattaaccctgttatgcaaattatggtttactggatggtttttggattaggaataagaagtaatgcaccaattcatggtgtaccttttgtttattggttattggttggtatcagtatgtggttcttcatcaaccaaggtattttagaaggtactaaagcaattacacaaaagtttaatcaagtatcgaaaatgaacttcccgttatcgataataccgacatatattgtgacaagtagattttatggacatttaggcttacttttacttgtgataattgcatgtatgtttactggtatttatccatcaatacatatcattcaattattgatatatgtaccgttttgttttttcttaactgcctcggtgacgttattaacatcaacactcggtgtgttagttagagatacacaaatgttaatgcaagcaatattaagaatattattttacttttcaccaattttgtggctaccaaagaaccatggtatcagtggtttaattcatgaaatgatgaaatataatccagtttactttattgctgaatcataccgtgcagcaattttatatcacgaatggtatttcatggatcattggaaattaatgttatacaatttcggtattgttgccattttctttgcaattggtgcgtacttacacatgaaatatagagatcaatttgcagacttcttgtaatatatttatatgacgaaaccccgctaaccattaataaatggaagtggggttcatttttgtttataatttaagtaaataacatattaagttggtgtattatgaacgttttaataaagaaattttatcatttggtagttcgaatactttctaaaatgattacgcctcaagtgattgataaaccgcatatcgtatttatgatgacttttccagaagatattaagcctatcatcaaagcattaaataattcgtcgtatcagaaaactgttttaacaacaccaaaacaagcgccttatttatctgaacttagcgacgatgttgatgtgatagaaatgactaatcgaacattggtaaaacaaattaaggctttgaaaagcgcgcagatgattattatcgataattattacctattgctaggtggatataataagacttctaatcaacacattgttcaaacgtggcatgcaagtggtgcattaaaaaactttggcttaacagatcatcaagtcgatgtgtctgacaaggcaatggttcagcagtaccgtaaagtttatcaagcgacggatttttacttagtgggttgtgaacaaatgtcacaatgttttaaacagtctttaggtgcaacagaagagcaaatgctgtattttgggcttccgagaattaataaatattacacagctgatagagcaacggttaaggcagagttaaaggataaatatggaattacaaataagttggtattatatgtaccaacatatagagaagataaagcagataatagggctattgataaagcttattttgaaaaatgtttaccaggatatacactgattaataaattacatccatcaattgaagattcagacattgatgacgtatcttcaatcgacacgtctacattaatgctaatgtcagatataattattagcgactatagttcgctgccaatagaagctagcttgttagatattccaactatattttatgtgtatgatgaaggaacatatgatcaggtgagaggcctgaatcaattttacaaagcaataccggatagctacaaagtgtatactgaagaagatttaataatgacgatacaagaaaaagaacatctattaagtccgttatttaaagattggcataagtataatactgataaaagtttacatcagctcacagaatatatagataagatggtgacaaaatgaggtttacgataatcatacctacatgtaataatgaggcaacaattcgacaattgttaatatctattgagagtaaagaacactatagaatcctttgtattgatggtggttctactgatcaaacaattcctatgattgaacggttacaaagagaactcaagcatatttcattaatacaattacaaaatgcttcgatagctacgtgtattaataaaggtttgatggatatcaaaatgacagatccacatgatagtgacgcatttatggtcataaaaccaacatcaatcgtattgccaggtaaattagataggttaactgctgctttcaaaaataatgataatattgatatggtaatagggcagcgagcttacaattaccatggtgaatggaaattgaaaagtgctgatgagtttattaaagacaatcgaatcgttacattaacggaacaaccagatttgttatcaatgatgtcttttgacggaaagttattcagtgctaaatttgctgaattacagtgtgacgaaactttagctaacacatacaatcacgcaatacttgtcaaggcgatgcaaaaagctacggatatacatttagtttcacagatgattgtcggagataacgatatagatacacatgctacaagtaacgatgaagattttaatagatatatcacagaaattatgaaaataagacaacgagtcatggaaatgttactattacctgaacaaaggctattatatagtgatatggttgatcgtattttattcaataattcattaaaatattatatgaacgaacacccagcagtaacgcacacgacaattcaactcgtaaaagactatattatgtctatgcagcattctgattatgtatcgcaaaacatgtttgacattataaatacagttgaatttattggtgagaattgggatagagaaatatacgaattgtggcgacaaacattaattcaagtgggcattaataggccgacttataaaaaattcttgatacaacttaaagggagaaagtttgcacatcgaacaaaatcaatgttaaaacgataacgtgtacattgatgaccataaactgcaatcctatgatgtgacaatatgaggaggataacttaatgaaacgtgtaataacatatggcacatatgacttacttcactatggtcatatcgaattgcttcgtcgtgcaagagagatgggcgattatttaatagtagcattatcaacagatgaatttaatcaaattaaacataaaaaatcttattatgattatgaacaacgaaaaatgatgcttgaatcaatacgctatgtcgatttagtcattccagaaaagggctggggacaaaaagaagacgatgtcgaaaaatttgatgtagatgtttttgttatgggacatgactgggaaggtgaattcgacttcttaaaggataaatgtgaagtcatttatttaaaacgtacagaaggcatttcgacgactaaaatcaaacaagaattatatggtaaagatgctaaataaattatatagaactatcgatactaaacgataaattaacttaggttattataaaataaatataaaacggacaagtttcgcagctttataatgtgcaacttgtccgtttttagtatgttttattttctttttctaaataaacgattgattatcatatgaacaataagtgctaatccagcgacaaggcatgtaccaccaatgatagtgaataatggatgttcttcccacatacttttagcaacagtatttgccttttgaataattggctgatgaacttctacagttggaggtccataatctttattaataaattctcttggatagtccgcgtgtactttaccatcttcgactacaagtttataatcttttttactaaaatcacttggtaaaacatcgtaaagatcattttcaacataatatttcttaccatttatcctttgctcacctttagacaatatttttacatatttatactgatcaaatgagcgttccattaatgcattccccatcatattacgttgcttctcgccaccaaggtttttatagtctcctgcacccatgataacttgattaattctaaatttacctcgtttggtagtaatcgtatggttgtaatttgctgtatcacttgatccagtttttaaaccatctgtacccggcaaactcatttttgcaccttccaatgaaaagttgaatgtgtaatacgtaactgcatgcgttgttggtgctaactgctttgtaaagtctaatattttaggtgtctctttaatcacgtgtaaatctaaaatggcatagtctctagcagtcgttacagtacgttcttggtctttatactttgttggtgcaaatgtacgtaatcttgaattttcagcacccgttggattgacgaaatgtgtatttttcattccgatagctttagctttgttattcattaaatcaacgaaatcgctggtgttttttgaaaccttcttagctaaaattaatgccgcggcattactagaattagatactgtaatttgtaataggtctgcgattgtccatacttgtccaggatatagtttcgtattactcaactcaggtagtgtagacataatatattctttgttcgtcattgtgactgtgtcatcaagtgaaagctgccccttatttacagcttccaatgttaagtacattgtcattaatttagtcatagacgctggattccacttagtatcgatattgtattgatacagtaattgtccagtttgacttacattaacagcactcgtcggttcgtatgcagccgacaaacctgcataaccatattgatttgctgcttgtacaggggttacgtcactgttagtagcttgtgcatatggtgtcataatacttaatgttaaacataaaatgatgataatagatattaaatttttcataaagcgttaatcttcccttttccaattcttaaatattccctaaaagcaatggttattcctacttacggaaatcattgctaattcacttcaccttaattaaattgttgaaaataaagttttctgcagttaatttgaaaaataatgcaaatatattacgtgtgtagctaaaggtgttataatgtttgtacgaagagcaaacttactcaaaagcgattaattttcatgttttaatataaagactttgagaagttattacaaaaaatgcaatagaaatattctatcatataaatgttatgagcggtattttggggcaacactttatttgatttttaaagttttgttgggagaaagtatatgatagaaatgcatgtatctatctaaatgaattaactataaatttcaaacagaagaggtaaaactatgaaacgagaaaatccattgtttttcttatttaaaaaactatcatggccagtgggtcttatcgttgcagctatcactatttcatcactagggagcttaagtggactattagtgccactgtttactggacgaattgtagataaattttccgtgagccatatcaattggaatctaatcgcattatttggtggtatctttgtcatcaatgctttattaagcggattaggtttatatttattaagtaaaattggtgaaaagattatttatgcgatacgctcagttttatgggagcatatcatacaattaaaaatgccattctttgacaaaaatgaaagtggtcaattaatgagtcgattaactgacgatacgaaagtgataaatgaatttatttcacaaaagctacctaacttattaccatcaatcgttacattagttgggtcactaatcatgttatttattttagattggaaaatgacattattaacatttataacgataccgatattcgttttaattatgattcctctaggtcgtattatgcaaaagatatcgacaagtacacaatctgaaattgcaaacttcagtggtttgttagggcgtgtcctaactgaaatgcgtcttgttaaaatatcaaatacagagcgtcttgaattagataatgcacataaaaatttgaatgaaatatataaattaggtttaaaacaggctaaaattgcggcagttgtacaaccaatttcaggtatagttatgttgctaacaattgcaattattttaggttttggtgcattagaaattgcgactggtgcaatcactgcaggtacattaattgcaatgatattttatgttattcagttatctatgcctttaatcaatctttccacgttagttacagattataaaaaggcagtcggtgcaagtagtagaatatacgaaatcatgcaagaacctattgaaccgacagaagctcttgaagattctgaaaatgtattaattgatgacggtgtattgtcatttgaacatgtagactttaaatatgatgtgaagaaaatattagatgatgtgtcgttccaaatcccacaaggtcaagtgagtgcttttgtaggcccttctgggtctggtaaaagtacgatatttaatctgatagaacgtatgtatgaaattgagtcaggtgatattaaatatggccttgaaagtgtctatgatatcccgttatctaagtggcgacgcaaaattggatatgttatgcaatcaaattcgatgatgagtggtacaattagagacaatattttatacggaattaatcgtcatgtttcagatgaagaacttattaattatgctaaattagcgaactgtcatgattttatcatgcaatttgatgaaggatatgacacgcttgtaggtgaacgaggattgaaactgtctggcggacaacgtcaacgtattgatattgctagaagttttgttaaaaatcctgatattttgttacttgatgaagcaacagctaatctcgatagtgaaagtgaattgaaaattcaagaagctttagaaacattgatggaaggtagaacaacgattgtcattgcgcatcgtttgtctacaattaaaaaagccggtcaaattatattcttagacaaaggacaggtaacaggtaaaggtacgcattcagaactgatggcatcacatgcgaagtataaaaactttgtagtgtctcaaaaattaacagattaattttatatatataagtaagcttggagcaaatacacatataccatcgaggaaattaaagtgtggcacattgatggatatagatgttaataaattgcttcaagcttttgtctattttaaatcatttgagaagttacgacataataattcttaaattaatgaaatcgatattttaagaaaaaaatgctcatggtataatacaagttataagcaaacatacatatattaaatactgtagccacgagtcataattcttcatattttacatagcaatttaactgattttagagtccacggtacagaagtttgatatttcaatgtttctaaatttttaaaaaattaaatcataggtgggtgccaaatgtttttattaatcaacattattggtctaattgtatttcttggtattgcggtattattttcaagagatcgcaaaaatatccaatggcaatcaattgggatcttagttgttttaaacctgtttttagcatggttctttatttattttgattggggtcaaaaagcagtaagaggagcagccaatggtatcgcttgggtagttcagtcagcgcatgctggtacaggttttgcatttgcaagtttgacaaatgttaaaatgatggatatggctgttgcagccttattcccaatattattaatagtgccattatttgatatcttaatgtactttaatattttaccgaaaattattggaggtattggttggttactagctaaagtaacaagacaacctaaattcgagtcattctttgggatagaaatgatgttcttaggaaatactgaagcattagccgtatcaagtgagcaactaaaacgtatgaatgaaatgcgtgtattaacaatcgcaatgatgtcaatgagctctgtatcgggagctattgtaggtgcgtatgtacaaatggtaccaggagaactggtactaacggcaattccactaaatatcgttaacgcgattattgtgtcatgcttgttgaatccagtaagtgttgaagagaaagaagatattatttacagtcttaaaaacaatgaagttgaacgtcaaccattcttctcattccttggagattctgtattagcagcaggtaaattagtattaatcatcatcgcatttgttattagttttgtagcgttagctgatctatttgatcgttttatcaatttgattacaggattgatagcaggatggataggcataaaaggtagtttcggtttaaaccaaattttaggtgtgtttatgtatccatttgcgctattactcggtttaccttatgatgaagcgtggttggtagcacaacaaatggctaagaaaattgttacaaatgaatttgttgttatgggtgaaatttctaaagatattgcatcttatacaccacaccatcgtgcggttattacaacattcttaatttcatttgcaaacttctcaacgattggtatgattatcggtacattgaaaggcattgttgataaaaagacatcagactttgtatctaaatatgtacctatgatgctattatcaggtatcctagtttcattattaacagcagctttcgttggtttatttgcatggtaatatgtcgaagagtgactatgataatacattttaactaataaatatgtccaggcatgtcgtctattgatataggtgagatgcttggacttttttattattgatataaaggtatttaaatatttttaaagttaccgaaattgaagcattataaaaaccaagtgcacatggtaatacacttggcttttatgggaaatgaatattattgtacatatgacagtaaggactaggtacagtcatagtacttcgagcaaaatttgttttgttattataaacaacacaaaggagataacttctctattgaagaagttaaaaacattatagcagacaatgaaatgaaagtaaattaaaaattcagaatatttttaattattatattgtgagtgatatttattagggaaagctattcttcatataaattagttaaatagtaaatctttgttagaactctttccatagagttgtgacagcatttttgttgtgctactatttttatagtctaataaatatataaaggggatggtttcgtgaataaaacggttaaagatttaatactagttgtcttaggttcatttatctttgctgcaggtgtaaatgcatttattatttctggtaacttaggtgaaggcggggttacaggtttagcaattattttatattatgcgtttcatatttcaccagccatcactaacttcttggtcaacgcagtattgattgccataggttataaatttttgagtaagagaagtatgtacttaactattcttgtaacaattcttatttcaatatttttgagtttaacagaatcatggcaagtagaaactggaaacagcattgtgaatgccatttttggtggtgtaagcgttggactaggaatcggagtaattatccttgcaggcggtacaacagcaggtacaacaattttggcgagaattgcaacgaaatacctcgatgtaagcacgccatatgctttgcttttcttcgatatgatcgttgttgcaatttcacttacagttattccacttgataaagtattagtaacagtaatatcactttatataggaacaaaagtgatggaatatgtcatagaaggtttaaacactaaaaaagctatgacgattatttcaactaatcccgacaaacttgccaaagcaatagacgagcaaattggaagaggtttaaccattttaaacggacatggctattatacgcgtgaagaaaaagatgtcttatacgttgttatttctaaaacacaagtttcaaaagcaaagcgattaattaaacaaatcgataaagatgcattcctcgtaattcatgatgtaagagatgtctatggtaatggctttcttgcagatgaataaataaatggtatgagcacacatacttaaatagaagtccacggacaagtttttgaactatgaagacttatctgtgggcgttttttattttataaaagtaatatacaagacatgacaaatcgagctatccaatttaaaaagtaatgttagtcaataagattgaaaaatgttataatgatgttcatgataatcattatcaattgggatgtctttgaaaattgataatttaaaaatagaaattattttttataaacagaaagaattttattgaaagtagggaaattatgaatcgtttgcatggacaacaagttaaaattggttacggggataacacgattataaataaattagatgttgaaataccagatggcaaagtgacgtcaatcattggtcctaacggctgcgggaaatctactttgctaaaggcattgtcacgtttattggcagttaaagaaggcgaagtatttttagatggtgaaaatattcatacacaatctacgaaagagattgcaaaaaaaatagccattttacctcaatcacctgaagtagcagatggcttaactgttggggaattagtttcatatggtcgttttccacatcaaaaaggatttggtagattaactgctgaggataagaaagaaattgattgggcaatggaagttacaggaactgatacattccgacaccgttcaatcaatgatttaagtggtggtcaaagacaacgtgtttggattgcaatggcattagcacaaagaactgatattatctttttagacgaaccaacaacatatttagatatctgtcatcaattagaaatactagaattagttcagaagctaaatcaggaacaaggttgtacaattgtcatggttcttcatgatatcaaccaagcgattcgtttctcagatcatcttattgcgatgaaagaaggggatatcatcgctacaggttcaacagaagacgtattaacacaggaaatattagaaaaagtttttaatattgatgttgttttaagtaaagatcctaaaactggaaaacctttactggtaacttatgacttatgtcgcagagcttattcttaattaagtaagttaatatgataaaaaggacaattaacatgacaaatagagagaacccaacgccattgaagtttttatcctatattataggtttaagtatgatactactaatcacactatttatttctacattaataggtgacgccaaaattcaagcctctacaattatagaggctatttttaattataatcctagcaatcaacagcaaaacatcatcaatgagattaggattcccagaaatatagcagcagtaattgtaggtatggcgcttgcagtttctggtgcgattatacaaggtgttactcgtaatggtcttgctgatccggcgctcataggtttaaattcaggtgcttcatttgctttagcattaacatatgcagttttaccaaacacttcatttttaatattgatgtttgctggatttttaggtgctattctaggaggtgctattgtattaatgataggccgatctagacgtgatggatttaatccgatgcgtattattttagcgggtgcagcagtaagtgctatgttaacagcgctaagtcaaggtattgcattagcttttagactaaatcaaacagtaacattttggactgctggaggcgtttcaggcacaacatggtcacaccttaagtgggcaattccattaattggtattgcgttattcattatattaacaattagtaaacaacttaccattttaaatcttggtgaatcattagctaaaggtttaggtcaaaatgtaacaatgatcagaggcatatgtttaattattgctatgattctagcaggtattgcagttgctatcgctggacaagttgcatttgtaggtttgatggtacctcatatagcaagatttttaattggaactgattatgctaaaattctaccattaacagccttgttaggtgggatactcgtgcttgttgccgatgtgatagcacgatatttaggagaagcgcctgttggtgcaatcatttcatttatcggtgttccttactttttatatttagttaaaaaaggaggacgctcaatatgattagttcaaataataaacgcagacaattgatagcactggctgtttttagcattctactatttctaggttgtacttggagtattacctcaggtgaatacaacatacctgttgaaagatttttcaaaactttaattggacaaggtgatgccattgatgagttaatcttattagatttcaggttacctcggatgatgattactattttggctggcgcagcgcttagtattagtggtgcaatagtgcaaagtgtcacaaaaaatccaatagctgaaccaggtatattaggtattaacgcaggtggcggatttgcaatcgcattatttattgcaattggtaaaattaatgctgacaactttgtttatgtactgccgttaataagtatactaggtggtatcaccactgcattgattatttttattttcagttttaataaaaatgaaggtgttacacctgcgagtatggtattaataggtgtaggtttacaaacagcattatatggtggctcaattacaattatgtcaaaatttgatgataagcaatctgatttcatcgctgcttggtttgcaggtaatatttggggtgacgaatggccatttgtcattgcatttttaccgtgggtgttgattattattccttacttactatttaaatcgaatacactaaatattattcatacgggtgataatattgcacgaggtctaggtgtaaggttaagcagagaacgtttaatattattctttatcgcagtgatgttatcatctgctgctgtagcagtagcaggttcaatttcgtttatcggattaatgggtccgcatattgccaaacgtatcgttggaccacgtcaccagttgtttttaccaattgccattttagtaggggcatgtttacttgttatagctgatacaattggcaaaattgtattacaaccaggtggggttccagcaggtattgtcgtagcaattattggtgcaccgtatttcttatatttaatgtacaaaacgaaaaatgtatagtgtcaatggacacaacttattgctatgaaaggcactttattataaggcttttcatagcattttttatttaatgagccactcaagactatttattttttcaataatgaaccattaagttatcaagaggatcttatcaaaaatatatttgataacggtatcaggttaattctttatgatagcgcattcatttattctgttttatactatgactgataataccaaggaggtacaacatgatgaaaaagttaatcaataaaaaagaaacatttttaactgatatgcttgaaggattgttaattgcgcacccagagttagatctgattgctaatacagttattgtaaaaaaagctaagaaagaacatggtgtagcaatagtctctggaggtggaagcggacatgaacctgcgcatgccggttttgttgcagaaggtatgctagatgcagcggtttgtggcgaagtatttacatcacctacacctgataaaatattagaagctattaaagcagtagatactggtgatggtgtattactagttgtaaaaaactatgcaggtgacgtgatgaatttcgaaatggcacaagagcttgcagaaatggaaggtataaatgttcaaactgttattgttcgtgacgacattgctgtgacaaacgaagtacaacgtcgtggtgttgcaggaacagtgtttgttcataagcttgccggttatcttgctgaaaaaggttattcattaacagagataaaatcgcgtgtagaagcgttgttacctgaaattaaaagtattggtatggcaattgagccaccgcttgttccaactactggaaaatatggctttgatattgaagacgacaaaatggaaatcggtattggtatacatggtgaaaaaggtattcatagggaagaagtaaaggatattgatcatattgttggaacattgttagacgaattgtataaagaagttactgccaatgatgtcatattaatggtaaatggtatgggtggtacgccgttatctgaattaaatatcgtaactaaatatattcaacaaaatttagctgcaagaacggttaatgttgctaaatggtttgttggtgattatatgacatctttagacatgcaaggtttttctataactatcgtgcctaataaaccagaatatttggaagcatttttagcaccaacaacaagtcaatactttaaataagaagtgaatatgaataaatatacatttatgaggtggcacaaatgaaagtgaatgatatgaaagcacgtttattaaatttagaagaaacgtttaaaaaacatgaatctgaattaactgaattagatcgagcaattggtgatggtgaccacggggttaacatggttcgtgggtttagtagtcttaaagacaaacttgatgatagctcaatgcaatcattgttcaaatcaactggtatggcattgatgtcaaatgttgggggtgcatcaggaccactgtatggctttagctttgttaaaatgtctgcagtcaccaaagatgatatggataatcaagatttcattacactaattcaggcatttgccgaagcggttgaatcacgtggtaaagttactttaaatgaaaagacaatgtatgatgtagtagcgcgagcagcagagaagcttaaaaatggtgaaactttaacattcaatgatttacagcaattagcagataatacaaaagatatggtagcaacgaaaggtagagctgcatattttggagaagaatcaaaaggttatattgatccaggtgctcaaagtatggtttatattttaaacgctttgattggagatgaagataatgcctaaaattatacttgttagccacagtaaagaaattgcaagtggtacaaaatctttgttaaagcaaatggcaggtgacgttgatattataccaatcgggggattaccagatggttcaattggaacttcatttgatatcatccaagaagttttgactaaattagaggatgatgcattgtgtttttacgatattggatcttcagaaatgaatgtagatatggcaattgaaatgtatgatggtaatcatcgtgtgttaaaagttgatgcaccaattgttgaaggcagttttatcgcagcagtaaagctatcaatcggcggttcaattgatgatgcattagcagaaatcaaacaatcattttagttaaaatttactaataatgaaaaatgtaaacctttttcaaatgaaactttataaaaaatatgatagtatatatgtaaatgtttaataaaatctggagaaataggaggacattgccatgcaacaccttataaaaaaacatgtattgaatggcgagtttgatttagtacgacaattgatgtccgaaacagattttatggaatttgaagaagcatatatttcaagtgcgcatgaagtagaaagtatgatgttttatacatgtattttagatatgattaagtacgaagaatcatctgaaatgcatgacttagcatttttattgcttgtgtatccactaagtgaatatgaaggtgctttggattctgcttattatcatgcagacgcttccataaaacttactgacggcaaagaagttaaaagtttgttacaaatgttattattgcatgcgataccaacacctgttatttcagataagaaggcttttgatatcgccaagcaaattttaaaattagatcctaataataatgttgctcgtaacgtcttaaaagacactgccaaacgtatggacaacgttgttgttgatataaatgaattacaccaacgtaatgcacgttaattacatttcaattatattagcttaataatagttttaacatttggttgggttgggcatatgttccagccttttttaatacttaaaaactaacgaagtatacttgtgtgcacaaatggtttttatacaacattttataaatttatacattttaataaagaacatacgatagatggtttaaaccttgttaactgagaaattttgatatgtattcttcgaaatttaactaaatatacgaaattcaagaagcacaataattaatcatttttcctatacaaaagttcgtatgactgcattataaaagcataaatttataatttttttaaatgtcattgaacgtgataatgtgaatggattgagcaattttgaaaaagtgaaaaataacctatgcgacttgcaattaattttcagtacgttataatgcacactgtgcaaaattaaggaggtctattattcacatgatgatgaataaagaagcaacaaaaattggatttgcctacgtcggcattgtagtgggcgcaggattttcaactggacaagaagttatgcaatttttcactaaatatggcttgtgggcttatttaggtgttattatatctggttttattttagcttttattgggcgccaagtagcaaaaattggtactgcctttgaagcgacaaatcatgaatcaacattacaatacgtattcggtgaaaagtttagtaaagtctttgattatattttaatcttcttcttatttggtatagctgtaaccatgatagctggtgcaggcgcaacatttgaagaaagttataacatacctacatggctaggtgctttaattatgacattagcgatttatattacgttgctattagactttaataaaatagtacgtgcactaggtatcgttacaccatttttaattgttttagttgtattaatcgctggcgtttatttatttaaaggtcatgtttcattagcagaagttaaccaagtagtgcctgaagcaagtatttggaagggaatctggtttggtacaatatatggtggattagctttttctgtaggttttagtaccatcgtagcaatcggtggggatactgaaaagcgtacagtgtcaggtgcaggcgcgatgtatggtggtattatctatactgtattactagcattgatcaactttgcattgcaaagtgaatatccaactattaaaaatgcctcaattcctacattgacgttagcaaataatatccatcctttaatagcaacagtgttatctgttattatgctggcggttatgtataatactattctaggactaatgtattcatttgcagcacgttttacagaaccatacagtaaaaattatcatatctttattattataatgatggtagcaggttatttattaagtttcgtaggatttgctgaattaattaataagttatatacaattatgggatatgtaggcttatttattgtagtagctgtaattattaaatatttcaaacgtaaaaatgcggataaaaaacatattgcttaatatcatatgagggatatccgaaactttacaattgaatcactttgttttaaccttaaaagcaattcgtctctactcttatcgggcgaattgctttttatatttattcagtctattaatatgagcgtctaacaaatagagaggtacgatgtaatgaataaagataataaatggacgatgataactgcgctttttataactgtaatcagtgtattgttagcatttcatctgaaacaacattatgaccaaattacaaatgagaaccatgctaataaagacaaaattaatattaaaaataaaaatgtgcgcatttatcaaaaccttacatacaatagagttttccctaacagtaaattagatattattacacctgttgatatgtcttctaatgccaaactgccagttattttttggatgcacggtggtggttatattgcgggtgataagcagtataaaaacccattattagcgaaaattgctgaacaagggtacattgttgtgaatgtaaattatgcattggcgccacaatataaatatcccacaccattaattcaaatgaatcaagcaactcaattcattaaagaaaataaaatgaatttacctattgattttaatcaagtaattattggcggtgattctgcaggtgctcaattagctagccaatttacggcaatacagacgaatgatcgcttaagagaagccatgaaatttgatcagtcattcaaaccatcgcaaattaaaggtgctatactatttggtggtttttataatatgcaaacagttagagaaactgagtttccaagaatacagttatttatgaaaagttatactggcgaagaagattgggaaaagagttttaaaaacatttcacaaatgtcgacagtaaaacaatcgacaaaaaattatccaccaacatttttatctgttggagatagcgatccattcgaaagtcaaaatatagaattcagtaagaaattacaagaattgaatgtaccagtagatactttgttttatgatggtacgcatcatttacatcatcagtatcaatttcaccttaataaacctgaatcgatagataatatcaaaaaagtgttacttttcttaagtcgtaatacatcctctagtggtattcaaactgaagagaaaccacaaatagaaaatccgagtaatgaattaccgttaaatcctttaaactaatgataaacagtagtaatttattacttaagcaacatttaagattttcaaattaaaaacgaagaatttaaaacatgtggtgctaatgtgtaagagtctgagatataataaattgttagcggttctttatcatttctatctcactctattatgatgtgacatttattttacaaactaatttgttttgaacctgaaaataactttttacaactaaattgtcgaaaaacagtgtgtacatgatataataaatttataaattgaaaagaattcaaaagaaaaattaaaatatagattgagcacgaagtgatttgaaataaggttgtgaaagggaatgacaaggtcagcattaaaaccatttaaaaataaacgcgttatggttactggacgtatacaacgtgttttgtttaaaaattatttagatagacatagcacatttaagccgaatgtaaggatattattaaaagatgtatttgtttcaggtgtatcaatagatcatttatggttatatgagacaaataaatactatgcattggcaatggaacttattcatcaacgagtaaaatttagtgcgaatgttgtaccgtattacaaaataaatagaaataataatttattcgtacaagattatggaattaagcgtaaaggtaggttaattactgaagaagcttacaatcaaaacaatcagtatcaggataagatatatgaaaaattaccggatatagattttagactcgaagatttttatagtaaggaaaactaaacaacatatataaagcaccactaatcgtagttgatagttaatcaattacacattagtggtgttttattttgaatttaaatttgataaatgaataagagtgtacgtatttatttgagattagataacattgataagtatgagtaatgtattaggtaaccattaaattcgttgttatacgattctgatacaagattatgataaaatagctttaattaagaattttagccatcatatagtcatcataatatttaccatcgataaataacttatcttttaaaacgccttcgatttgaaaatcggcacttttaaaaagctcgagggcaggttggttattgagtggtacatttgcttcaattcggtgtatttgattgtttaaacaccaagccataatggcatcaagaagtgcttggccaattccacgatgttgatataatttctttacacctaaatcaattttagcaacatgtttaatgcgttgaaatggtgtcgtattaacaaaggcaaagccaacgagttgttcatcactttcagcaacgaagatgactttatgcggagaagtgatatattcttctaattgtttactagccgatgtgacgctaggatcatattctcctggtgtgtagaacatatacggagattcgtcgtatatgttcgctaacattgaaatgaaattttctacatctttgatactaactctacgtataatatgggccataaaaagcctccagtattttgaaattttaaaacatttgctactattataatatatatgtaactaaaaggtggagtaatatgttttttggttacagtttaaaggagtattttagatgaaacctaaagttttattagcaggtggaacaggatatattggtaagtatttaagtgaagtgattgaaaatgatgctgaactttttgctatatcaaaatatccagacaataaaaaaacagatgatgttgaaatgacttggattcagtgtgatatatttcattacgaacaggttgttgcagcaatgaatcaaatagatattgctgtattctttatcgacccaacaaagaattctgccaaaataacacaatcatcagcaagagatttaacattaatcgcagcagataattttggtcgagcagcggctatcaatcaagtaaaaaaagtaatctacatacctgggagtcgttatgataatgaaacaattgaacgcctaggtgcatatggtacacctgtagaaacaacaaatttagtttttaaacgttctttagttaatgtagaattacaagtttcaaagtatgatgatgttagatcaacgatgaaggtagttttaccaaagggatggacattaaagaacgttgtaaaccattttattgcatggatgggttacactaaaggaacttttgtgaaaacagaaaaatcacatgatcaatttaagatatatattaagaataaggtgcgaccgctcgcagtatttaaaatagaagaaacagctgatggaataataactttaattttattgagtggaagtttagtgaaaaaatatacagttaatcaagggaagttagaatttagattaatcaaagagtcggcagtcgtttatatacatctatacgattatatccctcgattattttggccgatttattactttatacaagcaccaatgcaaaaaatgatgattcatggctttgaagttgactgccggattaaagattttcaaagtcgattaaaatcaggagaaaatatgaaatatactaaatgatattgggtgatatggatgcaaatactactagtagaagatgacaatactttgtttcaagaattgaaaaaagaattagaacaatgggattttaatgttgctggtattgaagatttcggcaaagtaatggatacatttgaaagttttaatcctgaaattgttatattggatgttcaattacctaaatatgatgggttttattggtgcagaaaaatgagagaagtttccaacgtaccaatattatttttatcatctcgtgataatccaatggatcaagtgatgagtatggaacttggcgcagatgattatatgcaaaaaccgttctataccaatgtattaattgctaaattacaagcgatttatcgtcgtgtctatgagtttacagctgaagaaaaacgtacattgacttggcaagatgctgtcgttgatctatcaaaagatagtatacaaaaaggtgatcagacgattttcctgtccaaaacagaaatgattatattagaaattcttattaccaaaaaaaatcaaatcgtttcgagagatacaattatcactgcattatgggatgatgaagcatttgttagtgataatacgttaacagtaaatgtgaatcgtttacgaaaaaaattatctgaaattagtatggatagtgcaatcgaaacaaaagtaggaaaaggatatatggctcatgaataatttgaaatgggtagcttattttttgaaatctcgcatgaactggatattttggatattgtttttaaacttccttatgttaggcattagtctaatcgattatgattttccaatagacagtttattttatattgtttctttgaatttaagtttaacaatgatttttcttttattgacatattttaaagaagtaaaattatataagcattttgacaaagataaagaaatagaagaaattaaacataaagatttagcggaaacgccatttcaacgtcatacagttgattatttatatcgtcaaatctcagcgcacaaagaaaaggttgttgagcaacagttgcaattgaacatgcatgaacaaaccattacagaatttgtgcacgacataaaaacacctgtgacagctatgaaattattaattgatcaagaaaaaaatcaagaaagaaaacaagcattactatatgaatggtctcgtataaactcgatgctagatacacagctgtatattactagattagaatctcaacgtaaagatatgtattttgattacgtgtcacttaaacgcatggtcattgatgaaatacaattaacaagacatattagtcaggttaaaggtattggttttgatgttgactttaaagtggatgattatgtttatacagatataaaatggtgtcgtatgattattagacaaattttgtcaaacgcattgaaatatagtgagaattttaatattgaaattgggacagaattaaatgatcaacatgtttcgttatatattaaagactatgggagaggtattagtaaaaaagatatgccgcgaatatttgaacgaggatttacgtcaacggctaacagaaatgaaacgacgtcttcaggtatgggtctatatttagtaaatagtgtaaaggatcaattaggtattcacctgcaagtcacgtcgactgttggtaaggggacaactgtcagattgattttcccattacaaaatgaaattgttgaacgcatgtcggaagtgacaaatttgtcattttaaacatgtgttttgttacttagaattgatacatcaatgcagcttcaacgttataataagatagatgttagtcatatgttaaattgaagatacaagtgccaaagcctaaaggaaatgaagttaagataaattataggagtgttaaagtggcaattttagaagtaaaacaattaacaaaaatatatggaactaaaaaaatggcacaagaagtgttgcgagatatcaatatgtctattgaagaaggcgagtttattgctattatgggtccctctggatctgggaaaacgacattattaaatgttttaagttcaattgattatatttcacaaggttctattacattaaaaggaaaaaaattagaaaagctttcaaacaaggaattatctgatatacgcaagcatgatattggttttatttttcaagagtataatttactgcatacattgactgttaaagaaaacataatgttaccactaacggtacagaagttagataaagaacatatgttaaatcgttatgaaaaagtagcagaagcattaaatatattggatattagtgataaatatccctctgaattgtctggtggacaaaggcaacgaacatcagctgccagagcatttataacattgccttctattatatttgctgacgaaccaacaggtgcactggattctaaaagtactcaagatttattaaaacgattaacaagaatgaatgaagcatttaagtctacaattattatggtaacgcatgatcctgttgcagcaagctatgcaaatcgagtagtgatgctaaaagatggtcaaattttcactgaattataccaaggggatgacgataaacatacctttttcaaagaaataatacgtgtacaaagtgttttaggtggcgttaattatgacctttaacgagataatatttaaaaatttccgtcaaaatttatcacattatgccatctatcttttttcgttaattacgagtgtagtattgtattttagctttgtagcattaaaatacgctcataaactaaacatgacagagtcatatccaattataaaggaaggctcacaagtcggaagctactttctatttttcatcataattgcatttttgttatatgccaatgtgttatttattaaacgacgaagttatgagcttgcattatatcaaacattaggtttatctaaattcaacattatttatatactaatgctcgaacaattactaatatttataattacggcaatattaggtattattattggtatttttggttcgaaactgttattaatgattgtctttacattattaggaattaaagaaaaggttccaattatttttagtttgagggcggtatttgaaacattaatgttaatcggtgtcgcttattttttaacatctgctcaaaattttatattagtgttcaaacaatctatttcacagatgtcaaagaataaccaggttaaagaaacaaatcataataaaattacatttgaagaggttgttttaggcatcttaggtatagtattgattaccacaggatactatctatctttgaacattgttcaatattatgattctatcggtacacttatgtttattttattgtcaactgtgattggggcatacttattttttaaaagctctgtttctctagtttttaaaatggtgaagaagtttagaaaaggtgttataagtgtaaatgatgtcatgttctcatcatctattatgtatcgtattaagaaaaatgctttttcacttacggtcatggcaatcatttcagcgattactgtttcagttctttgctttgctgctataagtagagcgtccttatcaagtgaaataaaatatactgcaccacacgacgttacaattaaagaccaacaaaaagctaatcaattagcaagtgaattaaacaatcaaaaaattcctcatttttataattataaagaagtaattcatacgaaattgtataaagataatttatttgatgtaaaagcgaaagaaccatacaatgtaacaattactagtgataaatacatccctaatactgatttgaaacgtgggcaagctgatttatttgtagcggaaggttctatcaaagatttagtgaaacataagaagcatggtaaggcaattataggaacgaaaaaacatcatgttaatattaagttacgtaaagatattaataaaatctattttatgacagatgttgatttaggtggaccaacgtttgtcttaaatgacaaagactatcaagaaataagaaagtatacaaaggcaaagcatatcgtctctcaatttggattcgatttgaaacataaaaaagatgctttagcattagaaaaagcgaaaaataaagttgataaatctattgaaacaagaagtgaagcgataagctcaatatcaagtttaaccggaatattattatttgtaacatcatttttaggtattacattcttgattgctgtatgttgcattatatacataaagcaaatagatgaaaccgaagatgagttagagaattatagtattttgagaaagcttggatttacacaaaaagatatggcaaggggactaaagtttaaaattatgtttaattttaggttacctttagttattgcactatcacatgcatattttacatcattagcatatatgaaattaatgggtacaacgaatcaaataccggttttcatagtaatgggattatacatttgtatgtatgctgtttttgcagtgacggcttataatcattccaagcgaacaattagacattccatataaaatatacagatggctttcagtagagtagtggattcggattcacgaactatactggaagctttttattataaatgaagagaagttatatttttagcatgtatagttgaatactgggttaaaataccatattaataatgaagtaaaggtatgagtgattatgaaagtgttttgaatgaaatatatttaattggtgatgcttttaattgaaaagattaacaggattcaactttgtaaattgtattaaatgtgagaaaataaaagtatattcattgagagatatatgagtcaatgatcgttttaaacaagataagtgtattttaatatgtaaaagttatgtaataaatattgtatcgttgcaaatttcccaactatatccatttacaatttttagagttgtatagataaaaaattgcctatacaataactttttcaaaacaaatgcctactactatttaaattttatgtaaaagttaagtttcggaattgttaaaaatttgtaaattgaattgtgggattgtaaattttgtgctattttcatataagggcaaatacagtaaattgtttactgtgaggcatttttgaaattaatatcagtacactaaaattatactgacgattgataataacaaatttgtatcattagtttgtaaattcacttgtcttaatttgaaacaaattataactgaatgtgattggtgacaatcgcttaaatggaggattttaaatgtttagtaagaaaaaagataagtttatggttcaattagaagagatggttttcaatctggatcgtgctgctattgaattcggtaaaatggatttcaatacacatttagatttaaaagcatactcagacaacattaaaacttatgagtcacatggtgacgaattagtacatcaagtaattactgatttaaatcaaacatttatcacaccaattgaacgtgaagatattttatcattatgtgatgcaattgatgatgttttagatgcaattgaagaaacggcagctatgtttgaaatgtattcaatcgaatacacagatgaatatatggctgagtttgttgataacattcaaaaagcagttgcagaaatgaaacttgctgtcggcttattagtcgataaaaaattatcacatatgcgtattcattcaattaatattaaagaatttgaaacaaactgtgatggtattttaagacagtcaattaaacatattttcaatagcgaaacagatccaatcactttaattaaaataaaagatatttatgaaagcatggaagaaatcgctgataaatgtcaaatcgtagcaaataattttgaaactattattatgaaaaatagctaaggggagtatatatttatgtcatatataatcatcgtcactatagctgtagttattttctcgctgatatttgactttatcaatggattccatgatacagccaatgcagtagctactgctgtatctactagagcgttaacgcctaaaacggcaattttaatggcagcagtgatgaactttataggtgctttaacatttacgggcgttgcaggcaccattactaaagacattgtcgatccatttaaattggaaaatggattagttgttgtgttagctgcaatacttgcggctattatttggaatttagctacttggttttacggaattccaagttcgtcttcacatgcacttataggttcaattgcgggtgcagcaatcgcatctgaaggctcatttggagtgttacattaccaaggtttcacaaaaattattattgtattaatcgtttcaccgattatcgcattttgtgttggtttcttgatgtattcaatttttaaagttatctttaaaaatgcaaatttaacaagagcgaatcgtaactttagatttttccaaattttcacagcagcgttacaatcattctctcacggtacgaatgatgcgcaaaaatcaatgggtattattacgttggcattgattgtcgctaatgtacagaatgatggcagtgttgaaccacagttatgggtaaaatttgcctgtgcgacagcaatggggcttggtactgcaattggtggctggaaaattatcaaaactgtaggtggtaatattatgaaaatacgtccagcaaatggtgctgcggccgatttatcatctgcattaacaatttttgttgcatcatcgctacatttcccattatcaacaactcacgttgtgtcatcatcaatcttaggtgttggtgcttctaaccgagctaaaggtgtaaaatggagcactgcgcaacgaatgatcattacatgggtgattacattacctatttcagcattgttagcaggtttactattctatatacttaacttatttttctaattgaaaataaaactaaactgaacttcagtatcacaaacatatggtggtattgaagttcagttttttatgtaagtagataacatattttatagaatttacgtagaatgaccaagacaaagcattttaattaggaggctatattataaatgtattccatggaacataatcagttaggtcattaaaatatatgtaagagcaaaataatgatttaatagtttatattcttcaatgaaggaataattaaatagttatcaacttgtttaattaacctaaattgtattgggctttatttaatataaatttgtatatgtagacgaaaaagcgtaaaatactggtataacaaattaaatcattatatagtcaacttagttgcattattttgatttttaatatattatgcatttaatttaatcaaataggtaggttgttaatttttacctaactaccattcatacaaaatataaatatgtatgatagggaagggtgagataattttttgtaccaaaatgaaaatttttttcaaaaataaaaaactagcaatctcacatgatgtgaattgctagtatatatcagtacaatttatttaattaatggatgaatgcatagctagaaacttctgaagctggaattgtacggtagttcatattgtatggaccatatgtgtaattcatttcagaaatcaagatactaccatcaccattgacacgttcaacataagcaacatgaccatatggaccaggtgtgctttgcataattgaaccaactgatggtgtgttgtttacttggtaaccatcattagctgcgttaccagcccaatacttagcgtctgaccaatatgtgctaattggactaccagcttgagcacgacggtcaaatacgtaccatgtacattgaccagcagtgtataaattttggtgattaaaagatgatgcattgccattgctacctgttgtagctgttggtgttgtaccacctgatccaccattaggaatttgtaatgtttggttaggcataattaaataaccacgtaagttattggctgccattaattgatcaactgaaacaccatatctgctagcaatgatatttaatgattcaccagcttgtacagtatgagatgatgctgaaccagcttgtggagaagtgtttgacgtattttgtgcatcacttccacctactgagataacttgaccagggaataccaagttgttatctaattggttattttgtttaatactctctactgaagtgttgtatttttgagcaatactccataatgattcaccagattgtactgtatgttgtgtagaagcttgtgcatcatgatgcgttaaaaatgcagctgcaccagatgttgctgttattgcaaatgctaattttttcaaagggactcctccttaaaattatgttttactacttttaaaaattattaagacaatttatatagtaaattaagttttcgttttatattacgatttccatattatcaaaaataagtagctttgtgtggtttgttattatcttgtaatattattaacattttaggatatcggttcatatttttataaatgctgatttgatagtgtataaaagcgttttagtgattttaactaattataaaaaattatattttgtaacattgtaaaatgtaaaattactatacttgttaaaggttatttcttttgatgaagcaaaatttactgtaaaatttgacgcataaaacgacggtagaaggaggaattattttgtcgcaaaatacaaatcattcatattatcatcaaaaccagcatgctcaatcaataagtaaagtgtggctttattttatgtattattggattatatttggcataggatgctatctaggtcagtttttaccattaagttggcgacaacccttgtcatttggattactgattattattttagcaacacttgtttttgaaagagcgagacggttcggtttaattatttcacatatttacgctgtagtgattggcttattgtcatacgcaacgtttaccacgtatttacaaaatttaggaccagatattttctataaaaatatcgcattagcaatttttgcatttatagcatttggtattattggttatttcttcgttggagatgcatcgagtataggcaaatatttattcgttacattaataacattaattattgcgagtctaattggtatttttcttcaaaatcctattttttacactattattaccgtcgttagtctgttgttatttctactttatactttgtatgattttaatcgtttaaaaagaggtgactattcaccaagagaaatgggatttaatctatttattaatttgttgaatattattaaggatatactttaccttgctaatatgttcagaagataaacagttaaattaataaagaaatttgtataaagttttggaataatcaataatgaatatcaaccttaaactggagcgattgtcataagttagaaacttagactgagattttactgataaagcaataaaaatatattaccttaattgtaaagatattattaatcattgaaatgattaactgctatagttctaaagtaaacaaatcttagaagataaactttaaacaggtgtacttgcctttctaattacacttttattagaaaagtaaagtatagctacgtattaattttaaaatcgaaacattaataggaagaagtatagataatataaacaatttaatgttagtttgagctcatctcaaaagtagaatgtgatttaaataagtgtttatttttaaattgaaaatgaatatataactaacaaaagataatagtaatacgttgtagatgtggtcatttaaaattattttgaaaatactaaaaagtagtgtgttttcaattggatagtttaattaaactgactacatctatttttgtaatatttaaatgattgatatataagtttaaaaattaaccattatatagttttatttatttttgatttggtattcgtattgtgttaaatttacgtttaattaaataagttaaatattatagggaatgataaaagtggtacttaaatatagaaagaggtaaagttatggcaaaatcatgcttgcatatacttactaataatgaatatgcgacaacgcgttgccaagatggcatagtcttattttggccaattgacggggaaatcgaactacaaaaatttcgtaaaagtaaaataattgaagatgatatatatattattaatcatctggatgtatttagtattaagaataataaaaaaacgatcatgttgtatttgagtagcgattggtttgcggaattaggctttactttctttaattaccactatacagcaaagttgattaaatcatcctataatttgaaatgtctactattaaaattgacatatcgataccttgataatcagcctcttaatgacgctgatattagaaaattacaggatattattaaaatcattgcaaaagaagcaagtatggataaaaagattgcacaaaatcaatatcgatatgcgtattatggtgatttgcgtgatgagctcgaatatatttatcaaaatgtaaatcaacgattgacattaaaaagtgtcgctgataaattatttgtctcaaagtcaaatttgtcatcacaattccacttacttatgggcatgggttttaaaaaatatattgatactttgaaaattggtaaatcgattgaaattctacttactactgatagtactattagcaacataagtgaacatttaggttttagtagtagctccacttactctaaaatgtttaaaagttatatggatataacaccgaatgaatatcgtaatttatcaaaatataataaatgtttaatgctaaagccagaaccactagtaggcaaaatggtgcaagaagtaaaagaaatcatattgaattatattgaacattataaaaaccacctaactgatgttatacatattgatgaagacaaatttgaaacacctaaattgtttcaaacggttattcaaataaatacttatacagaaatgaaattagttttcttagaaggaatctttaaaaccttattgaataagaacagtcaagttgtctttttcatcatgccatcgattctaaaaagtaaaaataccatgtccgaagaagaaaaattcacaatcattaaaacaataattgaaagtgatctaaagatagcatttaatataaataatattgaaacaacttattttgttgaagaagcttttatgagtgttttcagacaaatatctccaaacgaattaagtaatcataataattacgaagtgcattttgtttttgatttatcattgatggaaattagaacaatttatcgaatgatattaaaattacataacatcatgttgaatgtgaaattaggattgaacattacctgtttatttgaaaaaccttcagtttttaaatcactagtatcacaaataaagcgacttaaattcgattcgttaataatagataatgcaaatttaagtagcccttatttgatgggggaaagtgatgagttactattgaaaaatattttgcattttaaaaatttaaaacaagtaattaatgaattggatattgaacaagaaaagctgatttttctaaatgttgaaaatcataaactgcttaataataaagaacgagatctaagtaatagtgctccattaatttataagacattaagtgcgctgtatcacaactttgatggctttggattaaacatttttgacaatcatcaagcatttaatgcgatgcatctatatgacaaaaatggatttaaaacaacactaggtcttatattagaaaagtttatcgaatatgtctcgaaaccaaaatacgaaaacagttattattctatttttgatatagagaattattattgtcttgttatttatgattggcgagtgatagagagcgagacaattatgagtaattttgaggatagtcaagtttatataaattttaaaaacaatgttttaaacgataaatatctaattgtaatagaaacattggacgaaaatagtggcaacattaatcatttgatttctaaagaattaagagataaatatgaatggaaccctagtttactatctaaaattgacaactaccttaaaccagcaatagagattaaagagcataattttagtgataattccttgaatattaacgttacttttaatgcgttatacataattaaaataggaaaaaaataacaccttgatatgtattgcaaaatttaatttgcatttgttggtaattttgacaacgtattaaaaacaaatgagaaagacaatggctgaaaaatttaagataataatgacagaagcattgtctttatatatttgggggtgcaacattttgaatactgagaaattagaaacattgcttggcttctataaacaatataaagcattatctgaatatattgataaaaaatataagttgtcgctaaatgatttagcagtcttagatttaacgatgaagcattgcaaagatgaaaaagtacttatgcaatcatttttaaaaactgcaatggatgagctagatttaagtaggacaaaattattagtttctataagaagactaattgaaaaagaaagacttagtaaagttagatcatctaaagatgagcgtaaaatttatatttatttaaataatgatgatatatctaaatttaatgctttatttgaagatgtagaacaatttttaaatatttaattgaaattgagtgtcgaaagcatagaatttgcttatcggcacatttttaatttatacatattttaaaactaagtaacagtttgaagaaatcgtagttcaataatgttaattgtgaaaatgtatataaacataaaaaaatcatgtataatatatgttgttaattaaacagttcgaaagcgagatgacattatgggacgtaaatggaataacattaaagaaaaaaaggcccaaaaagataaaaacacaagtagaatatatgcgaaatttggtaaggagatttatgttgcagcaaaatctggtgaacccaatccagaatctaaccaagctttaaggttggtgcttgaacgcgctaagacatattcagtgccgaatcatattattgaaaaagcaatagataaagctaagggtgctggagacgaaaactttgatcacctaagatatgaaggatttggcccaagcggatcaatgctaattgttgatgcgttaacaaataatgtaaatcgtactgcctctgatgtgcgagctgcttttggtaaaaacggcggtaatatgggtgtatctggatcagttgcttatatgtttgatcatgtggcaacatttggtattgaaggaaagtctgttgacgaaatacttgaaacattaatggaacaagatgtagatgtaaatgatgtgattgacgataatggattgacaatagtctatgctgaaccagatcaatttgcagtcgttcaagatgcgcttcgtgcagcaggtgttgaagaatttaaagttgctgaatttgaaatgttacctcaaacagatattgaactttctgaagcggaccaagtaacatttgaaaaattaatcgatgcattagaagatttagaagatgtacaaaacgtattccataatgtggatttgaaataatgaaatcagcagaacaatggattgatgaattgcaacttgaatcacatcctgaaggtggtttctatagagagacaattcgagaagtattgaaagatggacgcagagcgccgtttagtagtatttattttttacttacagatgacaatatttcgcattttcatcgaattgatgctgatgaagtatggtactatcatgctggcgattctctaacaattcatatgataaatccggatggggaatatacgactgcaacattgggtactgatatccaaaatggagatgtattgcaatatgtagtgcctaaaggaacaatttttgcttcttcaatcgaaatatcaaatacttttagtttagtaggttgtatgtgtcaaccggcatttgagtttaagcagtttgaattgtttaagcaatctgaattaattacgcaatatccgcatcttaaatcagtaatcgaaaaatatgctttaaaataaaagtgatcaatgaagtggtttgaaggttgttaataaacctttgagtcacttcatttttatatgtattcttgattgaatcagaatagatttgatgcttcagctgtttttaatgaaaatagcattaaatgattttgaaaacgataagagtgtgttatttatatttttgaaaaatcacttttatgaagaaatgtgtgtactatctaattaatattgtctattttaagtaaattgaagcgagttgtagtaaaataataataaatattttcatatgattaacaaaaactataaaactgtatcatgacatgacatcatttatgtagttttatataataatgacaaggagttggtgactgtgaaagtaaagtatatagataaacgtcactggcgtcgcctaattgatagggaatacacagaggtaaaagttaataataataggtttaagggtattataggcttagtcacgatgaaaaaggttcgtgatcctttagaggtgacggtagttggacaaaatatcattgtcgcagatgacaattataaatggttgcaaatactacctgaaaagaaacgttatagtataactgtaatgtttgataataaaggcaatccattagaatattattttgatataaatatcaaaaatataacgcaaaaaggtaatgcgcgtacagtagatttatgtttagatgttttagcattaccaagtggtgaatatgagttggtagatgaagatgatttaatgtttgcattagaaagtgagcaaattacaaaaaagcaatttcatgaagcatatatgattgcacatcaaattatggcagagttagaaaatgattttaaaggattccaaaagaaaatcatgtactgctttaataaaattaatgcaaaggctcaaaaaaatcatcaaaagccacaaaataaaactaatattgaaaaaagcaaacaaataaagcctaagcaatataatcaaactaaaaatcaccaacaacaaaagaaaaactaagtaattcaagctgcagccataccaataaaattggtgaaattattcgttagtaatgaactcatgaatgcttgtagccatgaaagttcaataattgaataatttatggggggaaattatgaagattgaagactatcgtttactaataacattagacgaaacgaaaacgttacgtaaagcggctgaaattttatatatatctcaacctgctgttacacaaagactaaaagctattgaaaatgcttttggagtagatatttttatcagaacaaaaaaacaattgattacaacaactgaaggaacaatgattattgagcatgctcgtgacatgttgaaaagagagcgattattttttgacaaaatgcaggcacatattggtgaagtgaatggaacaatatcaatcgggtgttcttctttgattggacaaaccttacttcctgaagttttgagcctatataatgcccaatttcctaatgttgaaatacaagtgcaagttggttcaactgaacaaattaaagcaaatcatagagattatcatgttatgataactcgtggaaataaggtaatgaatttagctaacacacatttatttaatgatgatcattattttatttttccaaaaaatagacgagatgatgttacaaagttaccatttatagagtttcaagctgatccgatttatataaatcaaataaaagaatggtataacgataatttagaacaagattaccatgcaactattacagtggatcaagtagcaacttgcaaagaaatgttgattagtggtgtaggtgttacaatcttgccagaaattatgatgaaaaatatcagcaaagaacaatttgagtttgaaaaagtagaaattgataatgaaccgctgattcgttcgacatttatgagttatgatccgagcatgttgcaattgccacaagttgattcttttgtaaatctcatggcgagctttgttgaacaaccaaaggcgtagttttagactaatttaaggtttgtatttaattttaaactattcggttaaattgaacgtagttggttgctaatgcaccaacagcaaaagagcccctaattaataaattaaaaggggacaaaggaatacagttggttgctaatgcaccaactgcataagagcccctaattaataaattaaaaggggctctaagaagcggggttatggatatgtttgcagcgttattacaaataaagaattataaactctttgttgctaatatgtttctactaggtatgggtattgcggttacggtcccatatcttgttctttttgcaactaaagatttaggtatgacaacaaatcagtatggattacttctagcatctgcagcgattagccagtttacagtaaattcaattattgctagattttcggatacgcatcactttaatagaaaaattattattattctcgcattattaatgggtgcgcttggtttttcaatatacttttttgtagatacaatctggttattcatattactatatgcgattttccaaggattatttgcaccagcaatgccccaactttacgcatctgctagagaatctatcaatgtttcaagctctaaagatagagctcaatttgccaacacagtattacgttcaatgttctcattgggctttttatttggtccatttattggtgcccaattaatcggattaaaaggctatgctggattgtttggtggaacaataagtatcattttatttactttagtacttcaagtgtttttctataaggatttaaacattaaacaccctattagtacgcaacaacatgttgaaaaaattgctcctaatatgtttaaagacaaaacgcttttattaccatttattgcatttattttattacacattggacaatggatgtatacgatgaatatgcctttatttgttactgattatttaaaagaaaatgaacaacatgtcggttatttagctagtttatgtgctggtttagaagtgccatttatgatcattcttggcgttttatcatctagattacagactcgaacattgttgatttatggagcgatttttggtggtttattctacttcagcattggggtatttaaaaacttctatatgatgttagcaggacaggtgtttttagctattttcttagcggttcttttaggaattggtattagttatttccaagatatcttaccagattttccaggatacgcttcaacactattttctaatgcaatggttattggacagttaggcggtaacctattaggtggtgctatgagtcactgggtaggtttggaaaatgtattttttgtatcagcagcatcaatcatgttaggtatgatacttatattctttactaaaaatcaaaaaattacaaaagaggatgtgatatcaacatgacaattattttatggctacttatcatcgctgccttcatgttagcatttgttgggttgattaagccgattattccttctgttttagtattatgggttggctttttaatctatcaatttggctttcataatcagcatttatcatgggtgttttatgtatctatggcattgctaacaatattaattttatgtgccgactttttagctaataaatattttgtgaatcgcttcggtggttctaagtttggagagtatgcagctttaattggtgtggttattggatgttttgttttaccgccatttggaattattattataccttttattttggtattcatagttgaattaatacaaggctattcatttgaaagagcagttaaagtaagtataggttcaatcgtagcatttttaacaagtagtatagctcaagcaatcattatgtttataatgattgtatggttctttatagatgctttattgattaattaataaaaagcttattgcaaaatatgtttttcggtaactgtaatttagtgattttatcattaacagtaccaaattcgcatatgatgtaataagctttttgtttataaaaatgtatgagaatgttttttcgaaatatttctttcaatgcgtaatccaataggcataactataaatgaaaatataataaatacccaattgcttacctgaatatatggtccaaaggcaagtaatgattgtggaataaagaatacatagaaaaatcctacaattagtagaatgattgctaaataggtgaatatccatatccaatttgaattgttaaaacactgcagttgtattgttttaaaactaaaccatataaataaaaagacaataaagaatccaacgactactgaaaacgggaatgaaacaaaatataaattacttccattttttccatgaaaaatcctaaaaatcctttgagaaaactaacaatcccaattaatagaacgatgtgttgatagatatatttaaaaatatttttaaatgtttcattaggcatcgcttttagttcttttattgcatgtgcttttgggtcgtgattgaaaaaatctaaggctaataaaccatgttgttctgcgcttaataattgtttgagtatacggttaataattaactctgtatcatgagggttgacgcgaaagtcagagcgcatataagtcatataattctcgaagatttctctatcagtattgcttaatcttaatgatttaacattattttcttttgttaattgcgcagtacttttcattgttacttaagcgctcctttaaaaatgtttaattccaaattaaaatggaaatgattttatagtattaataaggtcaatcatatcatattaaacgcataaatataacgattaatattggagaggaaaatgaggacacttaataaagatgaacataattatatcaagcaaatagctaatatacatgagacattattgtcgcaagtagaatccaactataaatgtactaaactgagtattgctcttaggtacgagatgatatgttcaagattagaacatacaaatgataaaatttatatatatgaaaatgaaggtcaattaatagcgtttatttggggacattttagtaatgaaaaaagtatggttaacattgaactgctatatgttgaaccacaatttcgcaaactgggaatagctacgcaactgaagattgcgcttgaaaaatgggcaaaaactatgaatgcaaagcgaataagcaatacaattcataaaaataatttgccaatgatatctttgaataaagatttaggttatcaagtgagtcatgtgaaaatgtataaagatattgattagaattaggattatgttgctaattcatgttaaaattaaaaaagatttaatgacgttaaggagttttatatgaagaaattaatcatcagtattatggcggtcatgctatttttaacaggttgtggtaaaagtcaagagaaagccactctggaaaaggatatcgataatttacaaaaagaaaataaagaattaaaagacaaaaaagaaaagcttcaacaagaaaaagaaaaattagcagataagcaaaaagaccttgaaaaagaagtgaaagatttaaaaccttcaaaagaagataacaaggatgataaaaaagacgaagacaaaaataaagacaaagataaagataaagaggcatcacaagataagcaatcaaaagatcaaactaagtcatcggataaagataatcacaaaaagcctacatcagcagataaagatcaaaaagctaatgacaaacaccaatcataatcgaattgcttacttgttatagatgaaaggtacagcgttttaaaccttattttaagggtatgtattaattaaaatgtggtcatgattgaaacagaatgtaaaaatagacaacataattaataaaggagagaaacggcatgcatgaacaagattttagaattttagagggtcaagatattactttgccagaattaggtagagaattagaaaatattacaggacatacgattgctgattctactggcgaaattaagcgtgtaattgcacatttaccaaactttgagtccgatacagatacttttgttgctacatatcgtttaaaccatcaacaagattttatagatgcaacttttactgcgctgaaatcagatagagcacgtttaaaagaagtgccagttcatgttgaacttataagttatatttctaaatcaaaataaactgctatctaaaacgcaaagttgatcaaaatatcgattttgtgttttttattgagaaattatataggagtgtcaatcgatgatttattgtgaaacagagcgtttaatattaagagactggcatgaagatgatctgttaccttttcaaaaaatgaatgcgaattatgacgtacgtaaatattttccaagtttattgagttatcgtcgttcagaattagatatgagaactatggatgcggttattaaagattatggcattggattatttgctgtagaagataaagagtcccatcaatggataggctttataggtttgaattatattccagaaacaagcgattatccatttaaagaattaccgctttatgaaataggttggcgcttgttgccagaattttggggaaaaggattagcaactgaaggcgcaaaggcaacattgaagttagcagaagaacatcaaatatacgatgtctatagttttacagcagaagcaaataaagcttcacaacgtgtaatggaaaaaattggcatgacagtgtatgatcatttcgaattacccaatctaagtaagtatcatttattaaaaaggcaagtgcgctattacattaatcttcgaaagtgaaaaatttatacataagcgtaacaaacacccctaacattgtttagctgatgataacaatattaggggtgtttgtttattttttaaccttagaatgattaatcgtatgaacgagtacccagaggtttgaaatttaatattgattcaattaatgattccttagtgtcgcataacggtgcaagagcacgatacttaggatcaataaaaccttcctcaatcatatggtcaatcattgtttgtagtggattgaaaaagccattaatattataaatggcaataggcttttcatggatacctatttgagcccaactatacatttcgaaaaattcttctagtgaacctgcgccaccaggagccatgacaaatgcatctgcaagttctgccattttatttttacgttcatgcatagaatcaactaaaattaattcagttaaacgttggcttgtgatttcatgttcatctaacattttaggcatgacgccaatagctttgccgccatgatctaatacaccatcttgaatggcacccataatgccaattgaccctgcaccaaatactaattcataaccttgttcagcaaaatatttacctaaatcgtatgctttttgtacatatgaagggtcatgacctttgcttgcaccacaataaactgcgattcgtttcatgttaatccagctccttaattcgatgaatgacttttaatagtgattgttcaaacactttttgatcttgctttgtaaaaggtgggggacctttgtggcgaccaccttgttttctaatttgtgcattcatatatcgtttatctaatagttgttgaatatttttggaattgtatatcttcccattatgatgcatgacaattaagactttgtcgactaataaacttgcgagtccataatcttgagtgactacgatatcatccttcgttgataattgaacaattttgtaatcaactgcatctggtccatcatcaacatataatgttgatacatgtggaggatataattggttcgaaaaatggctgaagctccgaataattgtcacaaaaatgcctgtctcagttgttaaatctataatagaatcaacaacaggacaagcatctccatcaataataatatgtgtcacaattatgcctctgtattgttttctttattttgttgagaggcgcttttggcaacataatctttatattttttaaatgacttgatgcgtgctttatcagcttcttgttggcgtttttgttcttctttgtgtcgtttttcaatatttttttgtaactttttattcattttagcgatttctttgcgatttttttcagctagtttatcgccttttttctcagttttctcatctaatttattaggtgttaagcctgctttttcttcgtattttttgtgattttttcatatctttaatacgttgtatttcattcttttcgcgggctttttgctcttctttatgacgcttttcgatatttttttgaagtattttattcattttatcagcgtctttacgattttgtttagctaatttttcgccttttttctcaatataggcaggatcatgttctctagcaaactttttaagttcacgtttattttcaaaatcttgttttttatcgccgacatattctttaacatcactcgctgtgttactgattgctgcagatgtttttgaagcaactttacttgtagcatctgtaactttttgtacgtccggatgttgtttgatacgtttacgttcaacaattaacggtaccaatacaattggtaatacattaatcataaatttgatgacttttttcttatccatagatcttgcctccataattactttattaattttacataccctatgatacatcaatataaacgatgatagtagtgaatcactattaagtatttcagatgttttttaaaagaagacaataaaaactgccaatcaagtgattccttaattgacagtctatattttaaaaggaaattaaatacctttaccaatgccaaatccgaagtaaagtatagcaataaagattactaatacaattctgtaaatggcaaatggaattagtttgattttgttaattagatgcaagaatgttttgattgcaattagtccaacagtaaatgcagctaaaaagcctaaaatataaaaaggtatatcagcaatctgaatatcttgataatgttttaataaagataaaccactagctgctaacataattggaacagccataataaatgtaaagtccgatgctgctttatgatttaatttcattaataccccagttgaaattgttgagcctgaacggctgaaaccaggccacatagctactgcttgagaaataccaattacaaatgcttggaaataactgatttgatctactgtttgtgggtttttaactttagctgagtatttatcagcaataatcatatagatagcacctacgaataagccaatcataacagttggcacactaaataaatgttcttcgatgaaatcatcaaatagtaagcctaaaatacctgctggcaccatacccactaatacatgtaataaatttaaacgtcttggctttgaacgtctttgttgatcgttatctccttcaacatgtttgtgtttaccaatatgtaaaatctctaagaagcgttcgcggaacacccatgctgctgcaaagacggatcctaattggatgacgattttaaatgtaaatgctgactgagaacctaaaaattcagatgattttaaccacatatcatcaactaggatcatatgtccagtagaggaaacaggtgcaaattctgttaatccttcgacgacccctaagataataccttttattaattcaatgataaacataatgtacccactttcattactcaatttaatttatttaaatatcaaaattaccatatcatgatagcatattcatttaaagacatgctagttatagttataatactagactaaagatgtatatattcattttcttttacatgtaaaactacaatattttattgagctatttaatttgattttaaggaaaaccttttataataggtttaggtgatataattgtgaaaaaattaacaacaatactgtttcaatataaaatttttccggtactcatgttcttggtcagtactggtctcggcataatcgttataacgcaaaatattttaatagcagattttttagctaaaattataagacatcaatttcaaggtttatggattgtattatttattttattaggtgttttacttttaagagcaactgtgcaatttctaaatcaatggttaggtgatacattagcatttaaagttaagcatatgcttagacagcgggttatttataaaaataatggtcatccaatcggtgaacaaatgactatactcacagaaaacattgatggtctagcacctttttataagagttatttgcctcaagtgttcaaatcaatgatggttccgctcatcataatcattgcaatgtttttcatccatttcaataccgcattaattatgttaataactgcaccatttattcctttgttttatattattttcggtttgaaaacgcgagatgagtcaaaagatcaaatgacttatttgaatcaatttagtcaacggtttttaaatattgctaaaggtttagtgacgttaaagctatttaatcgtacagagcaaacagagaagcatatttacgacgatagtactcagtttagaactttaacaatgcgcattttacgcagtgcttttttatcgggattaatgctcgaatttataagtatgttaggtattggattggttgcattggaagcaacgctaagcttagtagtatttcataatattgattttaaaactgcggcaattgcgattattttagcgcctgaattttataatgcaattaaggacttagggcaagcgttccatactggaaaacaaagtgaaggtgccagtgacgttgtgtttgagtttttagaacaaccgaactataataatgaatttctattaaagtatgaggaaaaccaaaagccatttattcagttaacagacatatcatttcgatatgatgattctgatagattggtattaaatgatttaaatttggaaatatttaaaggtgatcaaattgcacttgtaggtccaagcggggcaggtaaatccactttgacacatcttattgcaggtgtttatcagccaacaataggtactataagtacaaaccagcgtgatttaaatataggaatacttagtcaacagccatatattttcagtgcttctataaaagagaatattacgatgtttaaagatatagaaaataatactattgaagaagtgctagacgaagtaggtttattagacaaagtgcaatctttcacaaaaggcattaacacaataataggtgaaggaggcgaaatgttatctggtggacagatgagacgcatagaactttgccgtcttttagttatgaagccagatctcgttatatttgatgagcctgcaactggtttagatattcaaacagaacacatgattcagaacgttctgtttcaacattttaaagatacaacgatgattgtcattgcacatagagataatacaattcgccatttacaacgacgcttgtatatagaaaatggaagactgattgctgatgatcgcaatatttcagtaaatataacagaaaatggtgatgacttatgaaaacacgactaaaatttcaagtagataaggatttattgttagctatagttgttggtgtttgtggaagtttagttgcgctcgccatgtttttcttaagtggttatatggtgacacaaagtgcacttggtgcgccactatacgctctgatgattttagtcgttacagtaaaattgtttgggtttttaagagctattactcgatacgtagagcgccttatttctcataaagctacatttacaatgctacgtgatattcgggtacagtttttcggtaaattagtaaatgtcattcctaatgtttaccgtaaactgagttctagtgatttaatttcacgtatgattagtcgtgttgaggcattacaaaatatatatttacgtgtttattatccaccagtcgtcatcggtttgacagcgctagttacagtcatagttttggcgttcatttcaatcggccatgcgctattgattatggttagcatgttgttcactttactcattgttccttggttaagctcaaaaaaagcacgtactttaaagaaacatgcagctaatgaacaggcccgatttttaaatcatttttatgattataaagctggtatggatgaactacgtcgatttaatcaaattaatcattatcgagataatttgatggctaaattaaatcattttgataaattacaacttaaagagcaacgctttttaacgatttatgattttatattaaatattattgctatgctttcgatttttggtagtttagttctaggattaattcaaattaatgcaggccaactaaatattatttatatgacgagtatagttttaatggtcttaactttatttgaacaagctgtaccaatgacaaatgtcgcgtattataaagcggatactgaccaagcattgcacgatattaatgaagtgatatctgtaccttctactaatggaaaaaaacgtcttaatgataagtatgatgcaacgaacatttatgaagttaaggatgctagttttaagtattggaatcagcaaacgtatgtgttgtcggatattaattttaatgttaatagaggcgaaaagattgcgattgtgggtccttctggttcaggaaaaagtacattactacaaattatggcagggttatatcaattagatagtggctctgttcgtttcgaaaatatggatatgtttgaaatagatgacaaagataagtttgaatcgttaaatgtcttgctacaatctcaacaattatttgatggtacaatacgtcaaaatttatttaccgatgaaaaagatgaagcggtgcaagcaatatttaagcaattagatttagaacatttggcactagaacgtcaaattgacttagatggtcatacattatctggcggagaaattcagcgtttagcgattacgaggatgttattaaaagatactgcatcaacatggattttagatgaaccaacaactgcattagataaacaaaatagtttaaaagttatggatttaattgaagcacatgcagaaacattaattgttgctacacacgatttaactttattgtcacgttttgagaccatcattgtgatgataaatggtaaaatagttgaaaagggaaactatcaacaattactagctaatcaaggtgctttatggaatatgattcaatataatgcataaaaaaactgcttgataggctaagaaacctttcaagcagttttttaactaacaagcttacgcgtgctaattgtttttctattcttaataaattctaaacattactttaattgtcatgacaaaagttaattatttttcctttgtttcatcaaatgcatgaatgactttacctaataagcgattaagttctttaacttcatcttgcgataaagaagaagctgaagcgactttgtcagatgcattacttaattctggtctaatagtttcacttttgtcagtcaagtgaataaatacttcacgttgatcgacttcggaacgttcacgcttaattaagtctacttgttccattcgttttaataatggtgatactgtaccagtatcgagtgctaattcagttacgactttcttgacgtttacaggagattcatcccataaaattgttaagacaagaaattgtgggtatgttagattgtacttcttaaaaactttgttagagtagtagcgattaacttgtctttgagcattgtacaaactaaagcatagctgttcttttaaattatgttgatcagacattaaagttctcctccagacatactatccgtttttttctcttttcggattggtaatcattaaaaagttgattgtttattaattcacaactttctttgattcaatgccatgctaaaattaaagtatgtttaaagtttagaagatatttttgattaaatcaagcaaaaagataatttaatatatatgttatcatttttaaaaataactgtaatagaaaagagaatataaaatgaaaaataataaagatgaaaaaataagaatatccataattaacggatttttgggtagtggtaaaaccacgttactgacacattatattagtgaattattaaaaaatgatgagaaaattaaaatcatcatgaatgaattcggtacttttgatattgatagcaatagtatttcaaatgaaattgaagtccattcattgattaatggttgtgtttgttgcgatcttaaacaagaacttgtctatgaactaaaagccattgctttaaaaggggacgttaatcatgtcatcatagaagcgacaggcattgcgcatcctttggaattactagttgcatgtcaagatccgcaaatcgttaatttctttgaaaagccgattatttatggtgtattagatgcgactcgatttttagaacgtcatcaatataccgaaaatacagtttcgctgatggaagatcagttgaaactaagtgacatgattattattaataaaattgatcttataactgatgacagtcttgagaaaattgataagcaattaggtatgatttgtgcaagtattccaacttataaaacaacctatggaaaagtttcgttggaagaattggacttaactgttaaagacagagagatatcgtctcatcatcaccatcatcatgggattaaaagtatgacttacacgtttacaggtccgattgatcgtcatttgttttatcaatttataatgaaattaccggaatctgttctacgtttgaaaggttatgtgtcatttagagatcaaccaaatgcaatttatgaatttcaatatgcatatggtttaccagactatggaataattggcatgcaattaccattaacgattgttattattggtgaaactttagatacaaatcacatacgtaatcaattggatatgctacaatttacgtaaatcagaaaatgtgttgtttcaatttaacggaaatagcacattaatttcttaatacttttattgtgaatattttgtgacattgagggatggagtggatgagatatggaacaaataatgattaatcactatgttcatttttctaggcttgtacaaggtttttggcgtgcaaatgaatggaagatgactgcgaaagagttaaattattttataaatgaattagttgaacgtggaattacaacgatggatcatgctgatatttatggagattatcaatgtgaatcactgtttggtaatgctttggatttatcacccgaattaagaaataaaattcaaattgttacgaaatgtggtatcattttgccttctaagcaatttgattttacaaatggacatcgttatgatttgagtagtaagcacatcgtgaaatctgttgaacagtcattaatcaatttgaatgtagattatttagatagtctactcattcatcgtccttcaccattgatggatccagaacaagttgctgatgcattaactaaacttgttaaacaaggtaagttgaagtcattcggggtgtcgaattttaatcattcacaataccaattgttaaatcaatatattatgaaagaaagactacatattagcatcaatcaattagaattatcgccatatcacgttgatagtttacaagatggaacaatggattcaatgtatcaaaaccatgttcaaatcatggcttggagtccttttgcaggcggtaaaattttcgacaaggaagatattaaagcgcaacgtattatgaaagttgttcaatcaatagctgacaaatatggtgtgagtgacacagctgtgatgatagcgcggttagtaaaaataccgcatcgtatcatgccgatacttggaacaagtcagttaaagcgtattgatcaagcaatcgaagggctacaacttaatttagatgatcagtcgtggtttgacatttacaccgctattatcggacaagatattccgtaaacttatttacttttaaatcataaaggagcatatcatgacaaacgaagataaacgtttcgaacaattaagatttgaacgcaaatttatagttattccgtatttaatttatgcagtcattgtattactattaaatattttctattctgatttgaaaataacaatgacattattcggacttttctttgcgtataatgtagtcattttgttcatagcatttgttaaacattataaacgcacattgttactaagtcttatattaacagtgcttagtggcgcggcattctttggaattatttatgtttatggcattaatcatttttaaacattaaaaagagactatctacaataatctcatttgcattttatctaactaagtttaacttttgcttagaaaaatgatgctatgaggatattcagtagatagtttttttatgatctaatatttaaacttagatatcgttttgtaattaaccgagataactcatcacctagcaatattatttacaaaatatttcgataaaattgtgtattttgcataaattaaaaatgtatgttttaaaaaattgttataattaaattaagattaaacaaaggggtgactgttatgtcagaagaaaaacatgtagttgaacatgaacaacaaaagaaagaaaagacaaaaaagcaatacaagccattttggattgtcatgagttttataatacttatagttgtactattactcccggcaccttcaagtctgccgataatggctaaggcagtactagctattttagcttttgcagttattatgtgggtaacggaagctgtatcatatccggtgtcagcaactttaattattggcttaatgatattacttttaggatttagccctgttcaaaatttaggggagaagctaggtaatccgaaaagtggcagtgctattttagctggaagtgaccttctaggaactaatcatgcattatcattagcgtttagtggatttgcaacttcagctgtagctctcgttgcagctgcattatttttggctgctgctatgcaagaaacgaatttgcataaaagactagctcttttagtgttatcaattgttggtaataaaactagaaatatagttattggagcaattatcgtttcaattgtacttgcatttttcgttccttctgcaacagctagagcaggggcagttgtaccaatcttgctgggtatgattgcggcatttaaagtttccaaagatagcaagttagcgtctttattaataattacttcagtacaagctgtgtcaatttggaatattggtatcaaaacggcggcagcacaaaatatcgtagcgattaattttataaaccatcaattaggatttgatgtttcatggggcgagtggttcttatatgcagcgccttggtccatagttatgtccgtagctttatatttcatcatgattaaagtgatgcctccagaaattaatacaatagaaggtggtaaagatttaataaaagaagaattgcataaacttggccccgttagcccacgtgaatggcgtttaattgttatatcgatgttattattactgttttggtcaactgaaaaagtattacatccgattgactctgcatccattactattattgctttaggtgttatgttaatgccgaaaattggtgtcatgacatggaaacatgttgaaaataaaataccatggggaacaattatcgtgtttggtgtaggtatttcactaggtaacgttcttttgaaaacaggtgcagctcaatggttaagtgatcaaacttttggtgttttaggtttaaaacatttacctattatcgcgacaattgcacttatcacgctttttaatatattgattcatttgggctttgcgagtgcaacaagtttatcatcagcgttaatacctgtttttatttcgctaacctctacgttacacttaggagaccagtctataggatttgttttaattcaacaatttgttattagttttggtttcttattacctgttagtgcacctcaaaatatgttggcttatggcactggtacttttacggttaaagatttcttgaaggcaggtataccattgacaattgtagggtatattctagtgatagtttttagcatgacttattggaaatggttaggtttgctttaattaaaaatataaataagaatctaggttattttaaagtgacaaaaagcttaataaaataaaaagataattgaagggtgttttgtttatggcaattgctgtgttattaaatcgaatgtttcgaatggaacacaatccattatttgaatatatttatcaacaaaaagaagacattgatgcatgttattttatcattccggaagaggacatgtcttcagcttctgatttgaaagcacagttttatcgcggtactttgcagcgcttttaccaatcgttgcacgcagaaaagcttacaccttatgttatgtcttatgacgatatcatttcattttgtaaagaaaacaatatctctgaagtagtgactgcgggtgatattatgagttatcatcttgaagaatatgatattttacatcaacgttctttattcaatgaagcacgcattgccgttactttgatacgtgggaatcattactttaaagcgagtaaaacaatgaatcaacaaggggagccatacaatgtttttactagtttctataaaaaatggcgaccttacttgaggcatagagacgtatatcactatgatttaaaatcattcgaaaactttgtcattgcatcacctgatgatttagtgtttgatgacatagcatttggatcctcacaaataattgaacagaataaatggcaacattttttagatcaagatatacagaattacgaaagcggaagagactatttacctgaagtattaacaagtcagctaagtgttgctttagcatatggattattagatattattgaaatttttaatgatttattggcgcgttatgatgaagatgaggcaaactatgaagcatttatacgtgaactcatttttagagaattttattatgtgttaatgacacagtatcctgaaacctcataccaagctttcaaacctaaatatcgacagataaaatggtcgcaaaatgaagcggattttaatgcatggtgcgaagggcaaacaggatttccaatcattgatgcagcaataatggaattgacacaaactggttttatgcataatcgaatgagaatggttgtgtcgcaatttttaaccaaagatttatttatagattggacatggggagaaaaattctttagaaagcaccttattgactatgatgcagcatcaaatattcatggatggcaatggtctgcttctacaggtacggatgcagtgccgtattttagaatgtttaatccaataagacagagtgaacgctttgatgctaaagctttgtatatcaaaacatatcttccgatttttaatcaaattgatgcaaaatatttgcatgatacacaacgcaatgagtccaacctttttgaacaggggattgaattaggtagtcattatccaagacaaatggtagatcatcaagaaaaacgtacacaagttttagctacatttaaagcgctagactaattcggctcaattgatagatctggcatgagtaaaatctggagcagaatataaagttcttaagcaatataaataagccaatttctattattgatgtgatagaaattggctttcctcaaatatataagttgtatttagttttcttattaatttgatgttatcttagtatgtccgtaaataaagtgaggtatagtacgacatactctaaaaacgtagcgagataaatatatttcaatctaacttttatgttttgaggcacttgccatttaggatattgtcgttcgtaatacgacacttgttgtataaatacacctagtccaaatggcagcatcatgagtaagatacttcttaaataacttaaaccaatatcatgccatatgtgtccaataatcaattgaaagacaatgatagatactattaaaacgattatatttattgtcacttgttcaaacgcactccttttccaaataatagaattgctgcttgcatgacaaccataaaacatacaaacatagcagttttaagcgttagactttctagaatgtgatttagaacatgtaagggctcattaaagaaataaacggaatgtaagcgtaagaaacgaccaatataaattccgaatccatttaaaaacattagcacgacaacaattaatctattaagccaacggtgagaagtcaatgttagtatttcaaaatagattaaaatcatcacataaaccgctaagaagacaccaagcagtaaataggtaaagtatttccactcacttaaatttagtcctgcgtaaaagttgaattgaaattggttcaaatggattaaatcagttaccatataaaatgtatttggtaaaagtaacacaaatataaaactatatatgataaagagtggccattcatactttttattcggtttgaataatcgtaataatagactaagctcaaaaggtatatatgctaaaaacaaatttaaagtcataaattgaaaaattttagtctcaaaaagggagacgataaataaaattaaaaagtaaattctagcgatgtatcgagattgcatcaataataaacactactttctaatgaaaaagttattcattcaaatgtgatagttataaacgcattcaattcctaattaaaaatttaatttaactcgttgaagtatattaataaacgagaatgcatttatgattaagcacttatgataacttgtaataaaatttgattcaactaaaaagtaaagtgctattgaggatcaagtaaatttaaaccgactgcatctttgaatgaacgttgaatgtccaaatcagttacagtaagaatgatttcagcagttgcagaaacaattgctttagcgagatgtccgctaaaagtttcatatgattgagtaccgaaagtagcatgcaaatgtgcaaaatgaccattgtctagacgagaaatattacctaataagctcgtcaattccagtggctcagtaatatgtttttcttcgtattgtttcgttgttaaattgaaaaattttaatacaacgtcatcacatgcaccaatgccgctgacagatgtaaatgttaagtcttggtcatctgcaaaggttgttatacattcaacgatatcttctcctttttccaacactagtagtatagtatgattacttttttgcaatttcatatgatcaatcccctttattttaatatgtcattaattatacaattaaatggaaaatagtgataattacaaagaaaaaatattgtcaaatgtagcaatgttgtaatacaatatagaaactttttacgaatatttagcatgaattgcaatctgtcgtggaaaagaagaataacagctttaagcatgacatggagaaaaaagaggtgagcatatgaataaacagatttttgtcttatattttaatattttcttgatttttttaggtatcggtttagtaataccagtcttgcctgtttatttaaaagatttgggattaactggtagtgatttaggattactagttgctgcttttgcgttatctcaaatgattatatcgccgtttggtggtacgctagctgacaaattagggaagaaattaattatatgtataggattaattttgttttcagtgtcagaatttatgtttgcagttggccacaatttttcggtattgatgttatcgagagtgattggtggtatgagtgctggtatggtaatgcctggtgtgacaggtttaatagctgacatttcaccaagccatcaaaaagcaaaaaactttggctacatgtcagcgattatcaattctggattcattttaggaccagggattggtggatttatggcagaagtttcacatcgtatgccattttactttgcaggagcattaggtattctagcatttataatgtcaattgtattgattcacgatccgaaaaagtctacgacaagtggtttccaaaagttagagccacaattgctaacgaaaattaactggaaagtgtttattacaccagttattttaacacttgtattatcgtttggtttatctgcatttgaaacattgtattcactatacacagctgacaaggtaaattattcacctaaagatatttcgattgctattacgggtggcggtatatttggggcacttttccaaatctatttcttcgataaatttatgaagtatttctcagagttaacatttatagcttggtcattattatattcagttgttgtcttaatattattagtttttgctaatgactattggtcaataatgttaatcagttttgttgtcttcataggttttgatatgatacgaccagccattacaaattatttttctaatattgctggagaaaggcaaggctttgcaggcggattgaactcgacattcactagtatgggtaatttcataggtcctttaatcgcaggtgcgttatttgatgtacacattgaagcaccaatttatatggctataggtgtttcattagcaggtgttgttattgttttaattgaaaagcaacatagagcaaaattgaaagaacaaaatatgtagcataagtattttggtgtatattgatataaagtaaagcgtaatattatgaatgattagcatcgtttttcttatgaattttattaagaaaattcgatgctttacatttaaaaagattcgattgactaaatgttttactctttatatttaaatgttatatgtaacaaaaaatgattttgagtaataaacatgttacaaatattacattctttttaaattgcaatccacatacctaattcattaacgttaatgtgttaagatgataaaaaatgagtaaggaaatgtgggtaaggggatgacagtaaaaaatttatttttaggctttgttgctgtaatattaaccgtttgtttaattggtttattaatattagcaacaaatgaagatgcgcttgctaaggtacataaaacaattaatacgcttaacgcgataaatgtatcaactgaagatacttataaaaagaaaatggatattctcaatattcatactgctaaagcatctgaagtgaatgaaaatgtgaaaaagcaaaatcattttaaacatcgtgtgaatgcaaataaatcaaattcttttaacgaacaagagtgccaagttattgctgatcgttatgcagataagcatatcaatgataattatggtttagaaagaatttctaagacaaatcatggatataattatgtgtattccaatgataattcaactagtaagcaacatgtaagtatttcaaatcaaggcataataacgaaataatagatggaacagtgtattctaattggatatactgtttttattttgcaataatttaatttaaaaaggtgaattcaacttataaaatgatgtaaatgttatgtcaaaatcaaccaatccgtaatgtattttaaaatgttaatatagttctgaagaagtataaatgaggtgttgaaatggctaaaaataagaaaacgaacgcgatgcgtatgcttgatcgtgcaaaaattaaatacgaagttcatagctttgaggtaccagaagaacatttatctggtcaagaagtcgcagaactcatacaagcaaatgttaaaacagtatttaaaacgcttgttctagaaaatacaaaacatgaacattttgtatttgttatcccagtaagtgaaactttagatatgaaaaaggcagctgctttggttggagagaagaaattgcagcttatgcctttagataatttgaaaaatgtaacgggatacattcgtggtgggtgttcgcctgttggtatgaaaacattgtttccaacagtcgttgacaaatcgtgtgaaaattatagtcatatcagtgtgagtggtgggcttcgaacaatgcaaatcacaatagctgttgaggatttgattacaataactaaaggcaaaattggagcagttatccatgaatgattaataacaacaaaaagtatggggcaagattaggagtgtgacagagatgaaatttttataaaattcatttctgccacactcctttttgattgaattagcattttacgatcataaacagtcattataattgagtatttgaacataaaaatgtaattttatcgtaacaatttgagtgtttgtgattgtttttggtaatttatgattgaaaagtgaaagcgtactcattataatacaaagtgagatggggtgatgatgataattactgaaaaaagacacgagttaatattagaagaactttcgcacaaagattttttgactttacaagaattaatagatcgaactggttgcagtgcttcaacaatacgaagagatttatctaaactacaacaattagggaaattgcaacgtgtgcatggtggtgcaatgttaaaagaaaatcgtatggttgaggcgaatttaactgaaaaattagcaacgaatcttgatgaaaagaaaatgattgctaaaatagcagctaatcaaatcaacgataatgaatgcttatttatcgatgctggttcatctacattggagctaattaaatatattcaagcgaaagatatcattgtggtaaccaatggtttaacacatgtagaagctttacttaaaaaaggtattaaaacaattatgctaggtggtcaagttaaagaaaatacacttgctacgattggttctagtgctatggagatattaagacgatattgtttcgataaagcttttatcgggatgaatggattagatattgaacttggattaactactcccgatgagcaagaggcattagttaaacaaacagcaatgtcattagccaatcaatcatttgtacttatagatcattctaagtttaataaagtatgttttgctcgtgtacctttgctagaaagtacgacaatcatcacatctgaaaaagcattaaatcaagaatcgttaaaagaataccaacaaaagtatcactttataggagggactttatgatttatacagtgactttcaatccttcaattgactatgtcatttttacgaatgattttaaaattgatggtttgaacagagcaacagcaacatataaattcgctggggggaaaggtattaatgtctcgcgcgtcttaaagacattggatgttgagtcaactgccttgggatttgcaggtggatttcctgggaaattcattatagatacattaaataacagtgcaattcaatcgaattttattgaagttgatgaagatacacgtattaatgtgaaattaaaaacaggacaagaaacagaaatcaatgcaccgggtcctcatataacgtcaacacaatttgaacaactgttacaacaaattaaaaatacaacaagcgaagatatagttattgttgctggaagtgtaccaagtagtattccaagcgatgcgtatgcgcaaattgcacaaattacagcacagacaggtgctaaattagtagtcgacgctgaaaaagaattggctgaaagcgttttaccatatcatccactatttattaaacctaataaagatgaattagaagtgatgtttaatacaacagtgaactcagacacagatgttattaaatatggtcgtttgttagttgataaaggtgcgcaatctgttattgtctcgcttggcggtgatggtgctatttatattgataaagaaatcagtattaaagcagttaatccacaagggaaagtggttaatacagttggctctggtgatagtacagttgcaggcatggtggctggaattgcttcaggtttaacgattgaaaaagcattccaacaagcagtcgcatgcggtactgccacggcatttgatgaggacttagcaacacgggacgctatagaaaaaataaaatcacaagttacgattagcgtacttgatggggagtgaaaataatgagagtaacagagttattaacaaaagatacaatagcaatggatttaatggcaaatgacaaaaatggtgttattgatgagttagtaaatcaattagacaaagcaggtaaattaagtgatgtcgcgtcatttaaggaagcgattcacaatcgagaatcacaaagtacaactggtatcggcgaaggtattgccattccacatgccaaagtggccgcagttaagtcaccagctattgcgtttggtaaatctaaagcaggcgtagattatcaaagtttggatatgcaaccagcacacttattctttatgattgcagcgccagaaggtggcgcccaaacacatctagatgctttagctaagttgtctggtattttaatggatgaaaatgtacgtgagaaattattacatgcttcatcacctgaagaagtactagcgatcatagatgaggctgatgatgaagtgacaaaagaagaagaggcagaagctgaagcacaacaagttgcaactgcagaacaatcatctaaacaatctaatgagccatatgtgttagcagtaactgcttgtccaacaggtattgcacacacatatatggcacgtgatgcattgaaaaagcaagcggataaaatgggtattaaaattaaagtagaaacgaatggttcaagcggcattaaaaaccatttaactgaacaagatattgaaaatgcaacaggtatcattgttgctgctgatgttcatgttgagacggatcgcttcgatggtaaaaatgtcgtagaagtaccagtagcagatggtattaaacgcccagaagaattaattaataaagcattagatacaagtcgtaaaccttttgttgcccgtgatggtcaaagaaaaggtaactcaaatgacagtcaagaaaaattaagcccaggtaaagcattctataaacacttaatgaacggtgtttctaacatgttgccacttgtaatatctggtggtattttaatggcaattgtatttttatttggagcaaattcatttaatccaaaaagctcagagtacaatgcgtttgcagagcagctttggaacattggtagtaaaagtgcattcgcgttaatcattccaattttatctggattcattgcacgtagtattgcggataaacctggtttcgcttcaggtcttgtaggtggtatgttagcaatttcaggtggttcaggatttattggtggtattattgcaggtttcttagcaggttacttaacacaaggtgttaaagccatgacacgtaagttaccacaagcattagagggattaaagccaacattaatttatccactattaacagtgacggctacaggcttattgatgatttatgcctttaatccaccagcatcttggttaaatcatttgttattagatggattaaacaatttatcaggttctaatattgtattattaggtttagttattggcgctatgatggcgattgatatgggcggtccattcaacaaagcggcatatgtttttgcaacaggtgcgttgattgaaggtaatgcagcaccaattacagctgcaatgattggtggtatgattccaccgttagcaattgcgacagcgatgttaatttttagacgtaaatttacaaaagaacaacgtggttcaattatccctaactatgtgatgggtatgtcatttattacagaaggtgcgattccatttgcagctgccgatccattacgtgttattccttcaatgatgattggttcaggtataggtggcgcaattgctttaggcttaggttcacgaattactgcgccacatggtggtattattgtaattgttggtactgatggtgcacacttacttcaaactcttattgcacttctagttggcacattagtttcagcattaatttacggtttaatcaaaccaaagttaactgaaacagaaatcgaagcttcaaaatcaatggacgagtagttttaatgatgtaaaatgattgttagcaaagagcttcatattaagttgtatgttcaatgaatatatgttagttttatatatcgtgttaacggtagcttatacaaagctgtaaaaacactttctattaattcagtttttatgaattgatatgaaagtgtttttatttttagataaatgaatgaagaaatagacaccacaaatgtatagacttttttaatattttgcaaaaagttatgccaaacgaagcagatatagtaaaatatgagtgtcttaaagtgaaaatttataaataaagaagggtttatacgtgtcagaattaattatatataacggcaaagtttatactgaagatggcaaaatcgataatggttacattcatgtgaaagatggacagattgttgcaattggagaagtggatgataaagcagcaattgataatgatacgacaaataaaattcaagtgattgatgctaaaggtcatcatgtattaccaggttttattgatatacatattcatggtggttatggtcaagatgcaatggatgggtcatacgatggcttaaaatatctatccgaaaatttgttgtctgaagggacgacatcatacttggccactacaatgacgcaatcgactgataaaatagataatgcacttacaaatattgctaaatatgaagcggagcaagatgttcacaatgcagcggaaattgtaggtatacatttagaaggaccatttatatctgaaaataaagttggtgctcaacatccgcaatacgttgtacgcccatttatcgataaaattaaacattttcaagagactgctaacggattaataaagattatgacgtttgcacctgaaattgaaggtgcaaaagaagcgcttgaaacgtataaagatgacattattttttcaattggtcatacagtagcaacatacgaagaagcagttgaagctgttgagcgaggagctaaacatgtcacgcatttatataatgcagcgacgccattccaacatagagaaccaggtgtttttggagcagcatggttgaatgatgctctacataccgaaatgattgttgatggcactcattctcatccggcatcggttgcaattgcttaccgtatgaaaggtaatgaacgtttttatttaattaccgatgcaatgcgtgcaaaaggtatgcctgaaggagaatatgatttgggtggacaaaaagtaactgttcaatcgcaacaagcacgtcttgcaaatggtgcgcttgctggtagtattttaaaaatgaatcatgggttacgtaacttaatatcatttacaggtgatacattagatcatttatggcgagtaacaagtttaaatcaagccattgcattaggtatcgatgatagaaaaggtagtattaaagtaaataaggatgcagatcttgttattctagatgatgatatgaatgtaaaatctacaataaaacaaggcaaggttcacacatttagctaataaataatcataattaaatgtatgcaatagatttaatctgttaacataagcactttatattatgataaaatagaagcaataacatttttttctgggggtgtctaaatgggaaggcgataacatgtagttgtaatttaagtcatagtgataaatttgaatgcgtgttacccatgagtgacacatataacatggaggtgaatccctagaaatagggaattaattggaaacttcgaccataattagtttgattatatttattctattaattgcattaaccactgtatttgttggttcagaatttgcattagtaaaaattagagcaacaagaattgaacagctagcagatgaaggaaataaacctgctaaaatagtaaaaaagatgattgctaatctagattattatctttctgcttgtcagttaggtataacagtaacatctttagggttaggttggcttggtgaaccaacgtttgaaaagctattacacccaatatttgaagcaatcaatttaccaactgcattaacgacgacgatttcgtttgcagtgtcatttataatcgttacgtatttgcatgtagtacttggtgaattagcgcctaaatctatagctattcaacatactgaaaagcttgctttagtatatgcaagaccattgttctatttcggtaacattatgaaaccattgatttggctgatgaatggttctgcacgtgttattattagaatgtttggtgtaaatcctgatgcccaaactgatgcaatgtcagaagaagaaatcaaaattattattaacaatagttataatggtggagaaatcaaccaaactgaattggcatatatgcaaaatatcttttcattcgatgaaagacatgcaaaagatataatggtacctagaactcaaatgattacactaaatgaaccttttaatgtagacgaattactagaaacaataaaagaacatcaatttacgcgttatccaattactgatgatggtgataaagaccacattaaaggatttattaacgtcaaagaatttttaactgaatacgcttctggaaaaacgattaaaatagcaaactatatacatgagttgccaatgatttcagagacaacacgtatcagtgatgcattaattagaatgcaacgtgaacatgtacatatgagtcttattatagatgaatatggtggaacggcaggtattttaacgatggaagatattttagaagaaatcgttggagaaattcgtgatgaatttgatgatgatgaagtgaatgatatcgttaaaattgataataagacattccaagtaaatggcagagtactattggatgatttaactgaagagttcggtatagaatttgatgactctgaggatattgatacgataggtggatggttacaatctcgtaataccaatttacaaaaagatgattacgtggatacaacttatgatcgctgggttgtttcagaaatcgataaccaccaaattatttgggtgatattaaactatgaatttaatgaagcgagacctactatcggacagtctgatgaagatgaaaaatcagaatagatattaatatataaaccaactaagaatgatttaattcatttttggttggttatttttttgactaaaattaatgaaaagtgaaaatagtattggaactcaatatctttaatgatttaatgaataatttttattgaaagcgataattcgtattaattgagtttgttgaaaaatttagggtaatgtaaagatataaaagatacatagattggagagatataaagatgttgaatgagatacaaatattaaataatggatacccgatgccttcagttgggttaggtgtttataaaatctctgacgaagatatgactaaagttgtaaatgctgcaattgacgcaggctatagagcgtttgatacagcatacttttatgataatgaggcttcactaggacgagcattaaaggataatggcgtcgatagagaagatttgtttataacaacgaagttatggaatgactatcaaggttatgagaaaacattcgaatatttcaacaaatcgattgaaaatttacaaactgattatcttgatttatttctaatacattggccttgtgaagcagatggtctatttttagaaacatataaagctatggaagaactttacgagcaaggtaaggtaaaagcaataggtgtatgtaattttaatgttcatcatctagaaaaattaatggctcaatcaagtatcaaaccaatggtgaatcaaattgaggtacatccatattttaaccaacaagaattacaagaattttgtgatcgtcacgatattaaagtgactgcatggatgcctttgatgagaaatagaggactactagacgaccctgtcattgttaaaattgctgaaaaatatcataaaacaccagcacaagttgtattacgttggcatttagcacacaatagaattattattccaaaatctcagacacctaaacgcattcaagaaaatatagatattttagattttaatttagaattaacagaagtagctgaaattgatgctttaaatagaaatgcaagacaaggtaaaaatccagatgatgtgaaaattggggatttaaaataactggatgttaaattttacgtttatgaatgccttttaatgtgtacattaaaataaatgagttggtttttactatttgataaaacaatactcaggtacattcaaaatcttttaaataaaaaggatggacatagatgaaaattagagtcgtcattccttgttttaacgaaggggaagtcattacacaaacacatcaacaattaactgaaatactttcacaagatagtagtgtgaaaggctatgattataatatgcttttcatagatgatggtagtacggataccactatagatgaaatgcaacatcttgccacaatagataggcatgtcagctttatttcttttagtagaaattttggaaaagaagcagctatgattgcaggttaccagcatagtactgaatttgatgcagtcatcatgatagattgtgatttgcaacatccacctgaatatattccgaaaatggttgaaggttttatggaaggctatgatcaagtgattgcaaagcgtgatagaagtggtgaaaattttagtcgcaaaacattaagccatttgtattataagttagttaattgctttgtagaagaagtacaatttgatgatggtgttggtgattttagacttttaagccaaagagctgttaaatccattgcatcacttgaagaatataatcgattttcaaaagggttatttgaatggataggctataatactaaagtgtttacgtatcaaaatgttgagagacaaaaaggggaatctaagtggtcctttaaaaagttatttaattatggtattgatggattgatttcctttaatagtaaacctttgagaatgatgatttatcttggcttgtttatcttttcaataagcgtgttatatattatctatttattcatcaatattatgatatctggtgttaatattccgggatatttttcaacgattgcagctattttattattaggcggcatacagttaatttcaattggtgttgtaggtgaatatattggcaggatatattatgaagttaaggcacgtcctaaatatattattcaagctacaaatctttcaagtcttgaaaatgatgagaaggatacccataaagtttattctaaataaacaaaaaaagaagccctcattaatgggagcttctttttagtctttgcattttattttataaataaatcggattatgacgtaatgtctaatttgtgtaatgttacagtcatcgtagttcctacatctatatcactgcttacactgatttttgcgttattttgttgcgcgagttcattagctatatataagcctaatccagaaccacccgtttttgtattacgagagttttctactctgaatgtacgttcgaatatacgttcttgtagttctggtataatgccaataccttcatcgctaatagcaatgtcgatagtatcttgatcttcgttttcactaatattaatatcaatgcgactaccaacatttgaaaattttagcgcattatcaagtaagtttgttaaaatacgctcaagtggcgttcgatattgataaaatgcatcaatttcgttacagaaattcacttctaatgtgcggttttcatgtttgatacgttgctcatatggttgcaatattgatacaagtaattggtctagttgtattaattctgggggatatgttttacctgtatttaaagtgataatatgagtcatatcatcaaataatgttgataatctgtttgcttgtttaattaatatgtcgtatgactctttaatctcatgatccttagtgattataccatcacgtagtccttcagaatatgaaataatgcttgctaaaggtgtttttaaatcatgggctaagttttgaatcagttctgttttttcttgttgttcggatttaatttgattcatttgttgcgtaatttcagaagccattttattaaaagattgatttaattcataaatttcttttggtgaattaaacgttttatcattgcttgcgtaatttccgttagcaaattgcttagtttttatattaaactgcttaattttttgtataagtggattaataaaaatactacatattaataaggttaaacagcttgtaattattgtcgttaaggtcaaagttagtgtcatatggccgttaaaccacattaaaatatatgcaattgctaaaatagttgaagttaatagtatactcgatacgacgccaataatgatttgacttctaattgataacaccattatcggctcctttcaaatttatatcctaatccccatacagttgtgatggtatatgttgtaaagctctctttttctaatttttctctaatacggtgtatatggacattcacggtattagcatcttcgtaatagtcatatccccaaactttttcaagtaattctgatttagaaataacttcattttctctagaagctaaataccacaataactcaaattccttaatacgcatagggacttcgtgaccatttacagtcacaactttacttaagttaataagtgttaattcatcaaacgacagttgttcaactggttgatgatggtatttcttcattcttgtaagtaaattattaatacgtaaaacgagttcccttggactaaatggttttttgacatagtcatctgcacctaaagttaaggcgtaaatggtatcatgttcttgtgttttggcagttaaatagataaaggggatatctaatttttgccttttcatttctttgacaatgtcgtaaccattaacttctggcatcatgatatcaagtaccatgatatcaatatcatttgatagtaaagaaattgcttctttaccgctagttgtcgttgttactttgtaaccttcatattcaaaataggtttgacaaatgtctacaatgtcttgttcatcatccacgatcagtaagtgggtcatctattttttcacctctgttcttacgacctctaaagtaattaatgatttctttaagtgaaatctgttttaacaatgagtgactcattagtaaaaggataaagaaagttaattgaagaggatacgtaaatatcatatctgctaagatataatttatcataacaaaggctccaaagaaactagcagcatatgcaaaaactccaaaaattaaacctaatccaattgcaatctctccgagtgggacaacaatatcaaataatgacgtcgtatgtgcaactatatttgcgaaaaaccacttataccactctggtgaatcagtattgttagcgatgactggtactaaacctttcagcgtaaatccgcccgttaatttttcgtagccttgcattaacataacaatacctgaacccacacgaatgataaatgtaacgagtagcaataatttattcatgatgttcacattctttctatttattgtgtgtaatttatataaacataagattaagcaacataatgcgatttgtagtgttatgtgaacaggaagtgtttgagctcatgggttgcttaagctaaacaaacctcaagctctaaaaaaatttacttatgtgctctgcaatcttatgggatttaatagttgtatatatattgaaaaaaggaaagtatgatttctacaagctaggggggctgtgaaatcatacgctttccattgagtaatgagtgtaatgtatattttaaaaatttgtaatgtatagtaatagtatgttgtaaataaaagtttaactcagaaattgattattttaatttagcgccgccgaagatgacgtgagcttttttacaatagattgttacttcatcatatttgcttaaatctacatttttaagatcaaatgtttgtttttctttatcgtagtcaaccattgcgatttctttaccgtttttaatgtcgccattttttgttaggtagacgtataaatctggaccttttgatgatttgtagttagtaagcattaatttaccatttttaatctcagctttaccttcaacagtttcaccgtttttagaactgaatgtacctgttaggtgttttgttttatcagttttaacattgctatcttctgactttgttttttgttcagttttgttaccttgatcttgtgaattagaattaccacaagcacctaaagctaatgttgtgataacagcaccagctgctaaaaaatattttgtattcatgctaactcctcatttcttcaatttgataagttaagtttaaaatgaaggcaaataatatgccattaactaattcttaacttcgtttaaatatcgcttaactaatattgaagaaagaataatttgaaaatgaaaataattgtctgatttaaataaataggggtcaaaataagaggagggcgtttttttaagtaaggaaatatttatctgaactagataacactataaaacacttctgatattttgaactaagaatatcagaagtgtttaatagttttggtattaaaatttataaaccttttgccacaataaaaacaacaagaaaataagatagacgattaaatacaagtaccaatatggtgttaaaaccatcataacgataaatgaaatgttaataatgataagtcctttaatcattagtttctttattttgttattattttcagcagtttcatctaagctattaaatgttgaaataaacaacataataccaccaatgatgaaaatggcaggggctaaaaatggaatagacatatatattgattgtgtacttgaaaagtcggtaacacgttgcgttaaactgacaacaatcgttaatatgatagcaataaatttttggtctgtaatgtatacaggttttaattttttatcaatgtaaaactgtagtatcgtccaaatgataaacatcgttatagtacacagagtaataaagttatatttatcaattatgaatgtatttataaaggcgtttatcgtaatagataacaacattgcacttaatgataaatgttgcatttgatgcctatataaattgaatccagttataagtacgacgatagcaatattaattaatatatatacaatcatgatggactcctgttcgttatacttcaatcaactattatatcaattaatatattgttattcattagatatgacttgcaaaaagtaaaataagttatcctttatacaccttttttattgctccaaagtaatgtatgaagttgtggtaacacataaacgtgattcatatcattactttgcataactaaatccaccaactgctcgtagcgttctaacaacttttcggtatgattatctacgctgtctgataaatatgggttaccaacttgtaaatagaagggaatatctggataacggtggtgtatcattttggcaaaatcataatctttatcgtcgaatacaactacttttaagtttaatgatgaaggtacgcattgtgtaatcacttcatctaacttttttaaatcaggtgtcatagttgaacttggtggttttggactaatcgttaaatcatcaatttgtgtcatccaaggttggaatttactgccttgtgtctccagtgcgctgaaaatacctttatcttgaaataagtcaactaactcttggatacctttaattaatgctgggttaccaccagaaattgtaacgtggttaaataaatcgccaccaattcgttttaattcatcataaatttcttcagcggtcatgagttttatatcgcctttagcactaccatcccaagtaaatgcagaatcacaccagctacagcgataatcacatccagctgttctcacaaacatcgtttttctaccgattactcgaccttcaccctgaatggttggaccgaatatttcgagtacaggaattttagccattagttacacctgttcctttggtctaaatacgacataacttgttggtgtttctcttacaaatacttgaatacattttggttggtgttcgagcgatgccaaattttctttaacaatttgataaattgtttccgctacgatttcagttgaagggattttgtttttaaaagcaggtaagttatttaacagttgatggtcaaatttaccgtgtatcatctttttcaaatggctaaagttcactaagaagccagtgtcatctagtttatcaccgacaattgttaaattaacaaagtaagtatgaccatggacattttgacaaatacctgcttcttcacatggaatgtgatgtgcagccgaaaaattaaaatctttatttaattcgaattgatatggatgcgttgtactaggatagatttgttgtaacattttaaagcgctcctttactttcaagatattgatttagtccacgttgacgtaaatgacaagctggacattcaccacagccatccccaatgataccgttatagcatgttaatgtttttgtacgaatataatctaaaacttcgagttcatcacttaatttccacgtttctgctttgtttaaccacattaaaggagtatgaatgacaaaatctttgtccatagctaggcttaatgttacgttcattgattttataaaactatcgcgacagtctgggtagcctgaaaagtctgtttcacatacgcctgtaataatatgcttagccccaatttgataagctagagcgcctgcaaacgacaagaaaagtaaatttctagctggaacaaatgtattaggtataccatcttcattattagtaatttccatatcatgttgtgttaatgcgtttggagtaagttgtgataataatgacatatctaaaacgtgatgtttcattccttgatcttgtgcaatttgttttgcgacttcaatttcagtatcatgtctttggccataattaaacgttacgagttcaacttctttgaaatgtttttttgcataaaagagacatgttgtactgtcttgaccaccactaaagacaacgatggctttttcattatttaatacactttccattttgtaattgctcctatcattaataatattaataaagaggttaatggcattgataagcccgtttttaatttataaaataaaaaaagcctatctccataaaagatagacgaaagaaatgggttgctcctataatatatattaaaggtttaccaacgaatgtttgaaatttcaatgtctagttttttatagagggtttcagctaggaacctctgatattcatttatgtacgatgaatagaatataccatatattagttaaaatcaaggtcaggataatgacaatgcttttaaagttttagctacatccaatacatattataaaaataaaacacatttagaacggagtatacaatgattctagtcatagataataatgattcatttacatataatttaatagactatattaagactcaaacgaaactaacagttcaagttgttggtattgataatctgctgatagaagacgtcattaatatgaagccaaaagcaattgttatttcgcctgggccgggtaatccggatgattatcctatcttgaatgaagtgttagaacaattttatcagcgtgtacctatactaggtgtatgtttaggatttcaatgtatcgtgtcttattttggtggaaatatcattcacggctatcatcctgtacacggacatactacacagttacgccataccaatgaaggtatttttcaaggactgcctcaaaatttcaatgtaatgcgttatcattcattaattgctgacggagcgacttttccaaattgcttaaagattacagcaaaaaacgatgaagcgattattatggcatttgagcatattagatttccggtttttggtgtgcaatatcatcctgaatctattttgagtgaatacggttatcgacaagttgaattatttttatcgaaggtaggtgattactgtgagaatagaatataattatcgctactatttaactgaaaatgaatataagcaataccatattcaattaaagggatttataaagaagtatgttgctactaagttggctgatgtgggagaagtgatacactttgcacaagcgcagcaacgacaaggtagatatgtctcgttatatttaagttacgaagcggcaaagtattttaatcatgctatgtgtacacattcattagctaaagatgatatttatgcagcagcttatagttttgaaaaagcggaaagcataaattcaacatatgaacatcaaacttcttatgtatcaaagtatcatttttcatttgttgaatcttctgaggttatgatgactaatattaaacgtgtccaacaagcaattgttgaaggcgaaacgtatcaagtgaactatacggcgcgcttaacggataacatttattatcctattagtactttatatgaacgattaactcaatttagtaatggtaattatactgcgttattacaaactgatgaaatccaagtagcgtctatctcaccagaattattttttcaaaaaggacaatttaacaatgtcgataacgttatcataagcaaaccgatgaaagggacaatgcctagaggtaaaacggaagctgaagatcaacagtattataaaacattgcaaacttcttcgaaagatcgtgcagaaaatgtcatgattgttgatttactaagaaacgatatagggagaatatcacagagtggctcaattaaggtgtataaactattttttattgaggcatataaaactgtatttcaaatgacttcgatggtaagtggaactttaaaaaataatacagacttaactcaaattttaacatcgttatttccttgtggttcgattacaggtgcaccgaaactgaatacaatgaaatatattaaacaattagaaagttcacctcgtggtatatactgcggagcaattggactattacttccaactgaagatgataaaatgatttttaatattccgattcgcactattgagtataaatatggacaagcgatttatggagtcggagcaggtattacaattgattctaagccaaaagatgaagtgaatgaattttacgcaaaaaccaagattttggagatgttataatgcaattatttgaaacaatgaaaattgataatggacatatccctagacttacttatcatactaatcgcataaaatgttcttctgagcgattaaactttaaatttgatgaacatgcatggcgaaatgaattaaacgatgtaacaacaaagtatcacagtggtcaatatagacttaaaatcgtattaaatgctgaaagcaaatttgaaacgatagtgtcacctttacctgagaaaagtagttttacagcaaaatttcaagtgttgcccaaagtagttaatccaacttttataaaaaataaaacgacagaacgaaagcatttagcacacaatcatgaaacagatttaatattgctaacttcagaggacggcaaggtccttgaatttgatattggcaacattgtcattgaagaggatggaaaatggtacacaccaagttataaagatgatttcttaaaaggatgcatgcgtgattatttaatagatagtgacaaacttgttgaaaaagactttaataaaaacgaattgatttataaatatcataacaatgagatacgtttatttttgataaatagtttacgagaggttgccgatgtccacctttgcctttaaaattagtatgataataaagtagaaaatgatgtgaaaacaaatttaaaaattaaatggggccaaatatgattattgtttatattgtgctgttgttaattcttgtatacgtaaattatcgattagtgaatcgattgctatctgaaaatagaatatatgttgttcgtttgatagcaacaattactactgttataagctttatccttgtatacgcattaattcacgaacttatgccttttgttgtgcgggcaatggatttaatgtaccaccagtaaatttagtgagtaggtaaaatgaactattcaatcgattctataattaaaaatgaaagtaaagtaaccaaatattgaagaggtgtacaaatgaaaatatatagtcaaggtgaccaagccattgtagtcgcaattgaaaaagaagtatctaaaagtttaaccgaagatttattaacacttcgctcatatttaattgaacaaaattatccatttattatagaaattgtgccatcagaatcagacatgatgattgtctatgacgcaagggatatgattaaacaccataatatacaatcaccttttttatacatgaaagcactaatagaatcgattcatttaaacataaaacatgattttaaccagcaagatttgattgaaataccaattgtgtatggttcgaaatatggtccggatttagaatcacttttaaaacattacaaaatcaagctagaaacttttattgaattacattctaaggcgcaatattttgtttcgatgatgggatattcacctgggtttccttatttaactggattaaataagaaattgtatattaatcacacgagtaaacagaaaaaattcattccagctggttctgtagtacttgaagggaaaaaatgcggtattgtaactacggatacaattaatgattggttagttattggttatacaccattatcactttttaatccgaaagaatcagatttcgcacgcttaaagttaggcgataatattaaatttagacctatcaatgaaaatgaattagaagtaggagcgtttaaagatgtcaatcataattgaaaaaagtggcttattcagtagctttcaggactttggcagaaggggatatgaacatgatggtgtaattccatgtggtgcacttgatactttagcacatgaaattgctaatcgattagttgcaaatgacaagaatgaagcaactttggaaatgactaataaaatggcaacgattcgttttacagaacctacgctgattgcattagcagggggtaatgtcaaagcttacactgagcatatgactatatctccatataaattgtatttgttagataaaggcgatgttttaaagtttagagaaacaagttatacatcgcgagtgtatttagctgtgggaggcggatttgaattagatgcatggttaggatctaactcaaccgactttaatgtaaaaattggtggttttaaaggtagaacattacaagatggcgatgaaataaagcttaagagagattatacagctcgtcatcataagttatttgaaaaccttgctcacacgaaacaaacagattggggtattgatggatacgccttgtcatttaattatatgtctgatgtatttcatgtcgttaaaaataaaggtacggaagattttaaagaagatgccattcaaagatttgtgaaacatgattataaagtaacgagcaaagcaaatcgcatggggatgatgcttgaaggtgaaaaaatcaaagctttttatgaagatatgccaccgtatcagactgtcaaaaaaggaacgatacaaattaagcgtgatggcacacctattatcctattaaatgatcattatacgctaggtagctacccgcaaatcggtacaatcgcaagttatcatttaacgaaattagcacaaaaaccgcaaggatcacgtttgaaatttcaatttatagatattttaacggctgaaaagaaccttgttaagtatagtaactggttaaaccaattattccatggaatagaatatagaatgcaattagaaatgatgaaataatatttggtacgtagctcatactcgagtccgatgcaaataatttcctcctaatgtataatgaaataatactgtgttttatctgcgaaatgtatcattttctaattcgtttcacagtaaaatgaaaagataaagtgtgtttttacttgaattttgactaaaattactctatatttattaattgagctatgcttattattacaatttgattacaaattttaaatttgttaattgaatgataatattaaataaagaaacttacacaagcaaatatgagttgtagcccaaaatacttgttaaatcaaagttgaaagctacaaataatgaaaattataaacttgaatctgaaagtaattactataattatgacaatgttaacttttaaacgcacttattaattaactacataatgttaatatctaatttattcaagtactttcgcaagatttattatctaaataacgggggaaagaatcatgagttcacaaaaaaagaaaattagtctttttgcgttcttcttattaaccgtaataacgattaccttgaagacgtatttttcttattatgttgatttttctttaggtgttaaaggtttagtacaaaacttaatattattgatgaatccttatagtttagtagcactggttttaagtgtgttcctattctttaaaggcaaaaaagcattttggttcatgttcataggcggcttcttattgacgttcctattatatgccaatgttgtgtactttagattcttctctgattttttaacgtttagtactttaaaccaagtaggtaacgtagaatctatgggtggtgcggttagtgcatcattcaaatggtatgactttgtttatttcattgatacgttagtttacttattcattttaatatttaaaacaaaatggttagacacaaaagcatttagtaagaaatttgttcctgtcgtaatggcggcttcagtagcattattcttcttaaacttagcttttgctgaaactgacagaccagaattattaacacgtacatttgaccataaatatttagtgaaatatttaggaccttataactttacagtatacgatggtgttaaaactatcgaaaataatcaacaaaaagcgctagcatctgaagatgacttaacaaaagtattaaattatacgaaacaacgtcaaacagagcctaacccagaatattatggggtggcaaagaagaaaaatattattaagattcatttagaaagtttccaaaccttcttaattaataaaaaggttaatggtaaagaagtaacaccgtttttaaacaaattatcaagtgggaaagagcaattcacatacttccctaactttttccatcaaacaggtcaaggtaaaacatctgactctgaatttacaatggataacagtttatacggtttaccgcaaggttctgccttttcattaaaaggagataatacgtatcagtcattaccagcaattttagatcaaaagcaaggctacaaatctgatgtcatgcacggtgactataaaacattctggaacagagaccaagtatataaacactttggtatcgataaattctatgatgcaacatactatgacatgtcagataaaaacgttgtaaacttaggcttgaaagacaaaattttctttaaagattctgctaattatcaagctaagatgaaatcaccattctattctcatttaattacattgactaaccactatccattcacattagatgaaaaggatgcaactattgagaaatcaaacacaggtgatgcaacagttgatggttatattcaaacagcacgttatttagacgaagcattagaagaatatattaatgacttgaagaaaaaaggattatatgacaattcagtgattatgatttatggtgaccactatggtatctctgaaaaccataacaatgccatggaaaaactattaggtgaaaaaatcacaccggctaaatttacagatttaaacagaactggtttctggattaaaatccctggtaaatctggtggtatcaataatgaatatgctggtcaagtcgatgtaatgccaacaattttacatttggctggtatagatacgaagaactatttaatgttcggtactgatttattctctaaaggtcataatcaagtagttccattcagaaatggtgactttataacaaaagattataaatatgttaatggtaagatttattctaataaaaataatgaactcataactactcaaccagctgatttcgaaaagaataaaaagcaagttgaaaaggatctcgaaatgagtgacaacgtgcttaatggtgatttgtttagattctacaaaaatccagacttcaaaaaggtaaatccttcgaagtataaatatgaaacaggacctaaagcaaactctaaaaaataatatctaaacacgaactcggattgataaaatatcaatccgggtttttattatgttcttttatattatgttttacattatatgtgttgataaaaaggtatattataaagatcattagcatagtcatcaaagccttaacaagttttatttatagttgaagcaacaatatattaaattatgacacttaacggtatcgatttcttttgatttcaaaaaggtgtataatgtatagaactgatttaagtacgtagagatttcaacagaagaaggaagatgggtatggaagcatataaaattgaacatttaaataaatcttatgccgataagactatattcgataacctagatttatcaatttcagaaggtgaaaaaataggtttagtaggcataaatggtacagggaaaagtacgttgttaaaagtaattggtggtattgatgatgattttacagccaatgttatgcatccaaatcaatatcgaattcgatattcgtctcagaaacaggaccttaatgaagatatgacagtttttgatgcagtattaagttctgatacaacaactttacgcatcatcaagcaatatgagcaggcagtacaagcttatgcggatgaccaaagtgataaattgttcaagcgaatgatggatgcgcaagatgctatggatcaacatgatgcttgggactataacgctgaaattaaaacaatcctctcaaaactaggtatacatgatactactaaatacattaaagaattatccggcggacaacaaaaacgtgttgtacttgctaaaacattaatagaacaaccagatttattgttattagatgaacctacgaaccatttagacttcgaatcaatcagctggttgatcaattatgtgaagcaatatcctcatactgttttattcgtaacccatgatcgatattttttaaatgaagtttccactagaattattgaactaaacagaggtaagttagcgtcatatcctggtaactatgaatcttatattgaaatgcgcgctgaaagagaagtaacacttcaaaagcaacaacaaaagcaacgagctttatataaggaagaacttgcttggatgagggctggagctaaggctcgtactacaaagcaacaagctagaattaatcgatttaatgacctagaaaatgaagttaaccagcaatataaagacgataaaggtgaattgaatcttgcttattcaagattaggtaagcaagtgttcgaattagaagacttatcaaaggctattaatgataaagtattatttgaacatctgacggaaattattcaaaaaggtgagcgtattggtgttgttgggccaaatggagctggtaaaacaacactcttaaatattttgagtggagaagaccaacaattcgaaggtaaattgaagactgggcagacggttaaagtagcttattttaagcaaacagatgagaccctggatagagatattcgtatgattgattatttaagagaagaaagtgagatcgcaaaagaaaaagatggaacctcggtatctattacacaacttcttgaacgatttttatttccaagtgcaactcatggtaaaaaagtttataaattatctggtggagagcaaaagcgtttgtatttattacgtctactcgtacaccagccaaatgttctgttgttagatgaaccgacaaatgatttagatactgagactttaacaatacttgaagattatattcatactttcggtggtacagtgattaccgtaagccatgatcgctacttcttaaataaagttgcacagtcatattggtttattcatgatggtcagatggaaaagattatcggaacttttgaagattatgaaagttataaaaaatcattagataaaaataaatccacattgaagcaacaatctaaatcttctacaactgtacgtaagaaaaatggtttatcatataaagaaaaattagaatatgaacaattgatgaaacgcatagaacaagcggaagtaagaatggaagaaattgatgtgctcatgattgaggcaagtgcagattatgggaaaattaaagaattaaacgaagaaaaagaacaacttgaaattcaatatgatttagacatcacaagatggagtgagttagaagaaattaaagaacaacaataaggggtcaatttatgatgcaacaaacattatcgcattactttgggtatgaaacgtttcgaccaggacaagaagaaattattagcaaagtattagaccatcgtaatgtgcttggtgtcttaccaactggtggaggtaagtctatatgctatcaagtaccaggtttattgttaggtggtacaacaattgtaataagtccactaatatcattaatgaaagatcaagtggatcaattaaaagcgatgggaattcaagctgcttttttaaatagtagtttgactcaaaaagagcaacaacgtattgaaaaagcattatcaaatggagaaattcaatttttgtatgttgcaccagaacgatttgaaaaccgatattttttaaatatgcttcagcgtataaagattcacttagtcgcgtttgatgaagcgcattgtatttctaaatggggtcatgatttcaggccgagttaccaaaatgttatttcaaaagtatttacgttacctcaagattttacaataatagcgttgacagcaactgccacggttgaagtacagcaagatattagagaaaagttaaatatcgctcaaactgatcaaattaaaacgagtactaagcgtagaaacttaatttttaaagtaaatcctacttatcaacgtcaaaaatttatattggattatattaaaacacacgatgaagatgcaggtattatttattgttctacacgtaagcaagttgaagagcttcaagaagccttagaaagtcagaaaattgaaagtgttatatatcatgcaggtttgagcaataaagaaagagaagaagcgcagaatgatttcttatttgatcgtgttaaagtagtcgttgctacaaatgcttttggtatgggtattgataaatccaatgtacgctttgttattcattataatatgcctggagatttagaatcttattatcaagaagcgggtcgtgcaggtcgtgacgggttgaaaagtgaatgtattttgttatttagcgaacgcgatatcaatttacacgagtattttataacagtctctcaagctgatgatgactataaagataaaatgggcgaaaagttaactaaaatgattcaatatacaaaaacaaaaaaatgtctagaagcaacaattgtccattattttgaaccgaatgaaaaattagaagaatgtgaacaatgtagtaattgtgttcaacaagataaatcatataatatgacacaagaagctaagatgattattagttgcatcgctcgtatgaaacaacaagagagttatagtgttatcattcaagtgttaagaggagagtcaacagattatattaagtataaaggttatgaccaaatttcaacccatggtttaatgaaaggttacacaacatcagaattaagtcacttaatagatgaattaagattcaaagggttcttaaatgaaaatgacgaaatattaatgtgtgatacttcaattaaaaaattactcagtaatgaagtagaagtattcacaacaccatttaagcaaaaagcgactgaaaaagtatttataaatacggttgaaggggttgaccgagtattattcagtcagttggtagaagttcgtaaaaagttaagtgacaaattaacgatagcacctgtaagtatattttctgattacacgttggaggaatttgctaaacgtaagcctgcttcgaaacaagatatgattaatattgatggcgtaggtagttacaaattaaaacattattgtccagcatttttagaaacgattcaaaattataaagccaaagtatagtgaagacacctagtaagcattccttgttttactgggtgtttttttgaattcaaggtaaaataacactatttcttaactggagattacctattattcattattttattaaaaaagttcaaggataaatcatttaaatttgaaaattgtaataaacgtggttaaatagggaatacatacatataatctcggttttatgctatgagaaaaaaagaggtggcaaagtgattaagtttaaaaatgtaactaagcgttatggcaaacatgttgctgtcgataacattagtttcaatattaatgagggtgaattttttgtgctaattggaccttcaggttgtggaaaaactacgacattaaaaatgattaatcgactcattcacttaagtgaaggttatatttattttaaagataaaccaataagtgattatccagtatacgaaatgcgttgggatattggatacgtattgcagcagattgcattattcccacatatgacaatcaaagaaaatattgcacaagtgccacaaatgaaaaagtggaaagaaaaagatatagataaaagagtagatgaattacttgaaatggttggattagaacctgaaaaatataaaaacagaaaacctgatgaattgtcaggggggcaacgacaacgtgtaggagttatacgtgcgttagcagctgatccaccagttattttaatggatgaaccgtttagtgcattagacccaatcagccgagaaaaacttcaagatgatttaattgaattacaaactaaaattaagaagacaatcatatttgttacacatgatattcaagaggcgatgaaacttggtgataagatttgtcttttgaatgaagggcatattgaacaaattgacacaccagaaggatttaaaaataatcctcaaagtgaatttgttaaacaatttatgggtagtcatttagaagatgatgcgccatgtgttgaagagaacgcaattatccgtgacttggatattatgaaaccaatcgatgaggttacatctatgagcgcttatccaattgtttatgacaatcaaccaattgaagtattgtatcaacttttatcagagagcgagcgtgtcattgtcatgcaagaagatagcgtaggtcaatatgttattgataggaaagatatcttcaaatatttgtcccagaaaaaggaggtagctcaacatgactaactttttcgacatattgagtgaacgtaaggggcaactcttttcgacaatgatagaacatattcaaatatcatttatcgcattattgattgcaactgctattgcggtaccattaggtattttattaacgaagactaaaacgatatctgaaatcgtaatgaatattgcggcaattcttcaaaccataccatcgttggcattattaggtttaatgattcctttatttggtatcggtcgtgtgccagcaattattgcacttgtagtgtatgcgttgttaccaattttaaggaatacgtatactggaattaaagaagttgatccatcactcattgaagcggctaaaggtataggtatgaaaccatttagacgtttaactaaagtcgaacttccgatagcaatgcctgttataatggctggtgtaagaacggctatggtattaattataggtacagcaacactagcagcattaattggtgcaggcggactaggagatttaattttattaggtatagaccgtaacaatgcatcgttgatattattaggtgcaattccagcagccttattggcaattatatttgatttaattttaagatttatggctaaattatcttataaaaagttattgatgacgttaggtgttatagtgatgattattatactggctatcgctattcctatgtttgcacaaaaaggtgataaaattacgttagctggaaagcttggctccgagccatcgattattacaaatatgtataaaattttaatagaagaagagaccaaaaatactgtagaagtgaaagatggtatgggcaaaacagcatttttatttaatgctttaaaatctgacgatatagatgggtatttagaatttactggaacagttttaggtgaattaacaaaagaaccattgaagtcaaaagaagagaaaaaagtttatgaacaagctaagcaaagtcttgaaaagaaatatcaaatgactatgttaaaaccaatgaagtataacaatacgtatgctttagctgtaaaacgtgattttgctaaacaacataatatacgtacaattggtgatttaaataaggttaaagatcaacttaaaccaggatttacattggaatttaatgatcgtccagatggttacaaagctgttcaaaaggcttataatttaaatttagataacatacgtacaatggaacctaagttgagatatcaagcgatcaataaaggtaatattaatttaatagatgcatattcaactgacgctgaattaaaacaatatgatatggttgtgttaaaagatgataagcacgtatttccaccatatcaaggagcaccattatttaaagaaagctttttaaagaaacatccagaaattaagaaaccgttaaacaaactagaaaacaaaatatctgatgaagatatgcaaatgatgaactataaagtaacagttaaaaatgaagacccatatacagttgcgaaagattatttaaaagcaaaagggttaatcaaataacgaccaacgccacataagatgcgtaacaccaaattatatcttatgtggcgttgttatatttaaatctataattatgttcaatttaaacatgcaataatgattaaaaaatatgacatgttaaacacaatgtaagctattatgatgtgaaaatagtagcattgcattttagaaacatagagcgatataatgaatataagttttttgaaatttcagttaattctaaggaggttgtttttattatgaaagaacaacttaatcaactatcagcatatcagcctggtttatctccaagggcattgaaagaaaagtatggcattgaaggagatttatataaacttgcatcaaatgaaaatttgtatggaccatcgcctaaagttaaagaagcgatatcagcacacttagatgagttatattattatcctgaaacaggatcaccgacattaaaagcggcgattagtaaacatttaaatgtagatcaatcacgcattttatttggtgcgggattagatgaagttatattaatgatttctagagctgtattaacgccaggggatactattgttacaagtgaagcgacattcggtcaatattatcacaatgcgattgttgaatcagctaatgtgatacaagtacctttaaaagatggtggcttcgatttagaaggtattttaaaagaagttaatgaagatacgtcattggtatggttatgtaatccaaataatcctacaggtacatattttaatcatgagagcttagattcgtttttatctcaagtacctccacatgtaccagtaattatagatgaagcttattttgaatttgtgacagcagaggactacccggatacacttgctttgcaacaaaaatatgacaatgctttcttattacgtacattttcaaaggcgtatggattagcgggtttacgtgtaggatatgtggtagcaagtgaacatgcgattgaaaaatggaacatcattagaccaccatttaatgtgacacgtatatctgaatacgcagcagttgcagcacttgaagatcaacaatatttaaaagaggtaacacataaaaatagtgttgaacgcgaaagattttatcaattacctcaaagtgagtatttcttgccaagtcaaacgaattttatatttgtaaaaacaaagcgggtaaatgaactttatgaagcacttttaaatgtagggtgtattacgcgaccatttccaactggtgttagaattacaattggttttaaagaacaaaatgataaaatgttagaagttttatcaaactttaaatacgaatagtaagtggggagtgggacagaaatgatattttcgcaaaatttatttcgtcgtcccaccccaacttgcattgtctgtagaaattgggaatccaatttctctttgttggggccccgccggcaaggttgactagaattgaaaaaagcttgttacaagcgcattttcgttcagtcaactactgccaatataactttgtagagcattgaacattgatttatgtctcaagctcaatgcagtgtgaatgatgaggtgagagtattcagtgtaaaaagcaacaatagatgatattgttttgtatcaattgcttttttgctatactgaatcaatactgatattttcaggagaagattaaaatgacccgtaaatcaatcgcgattgatatggatgaagtattggcagatacattaggagaaatcattgatgctgtcaattttagagcggatttaggtattaaaatggaagctttgaatggtcaaaaacttaaacatgttattcctgaacatgatggattaattacagaagtattgagagaaccaggcttcttcagacatcttaaagtgatgccgtatgcacaagaagttgtgaaaaaattaactgaacattatgatgtatatattgctacagcagcaatggatgtaccaacatcatttagtgataaatatgaatggttactagagttctttccatttttagatcctcagcattttgttttttgtggtagaaaaaacatcgttaaagctgattatttaatagatgacaatcctagacagcttgaaatttttactggtacaccgattatgtttacagcagtgcataatattaatgatgatcgatttgaacgcgtaaatagctggaaagatgtagaacagtattttttagataatattgagaaataaaatatatcacttgaaaaatttcatgtagaaaagatgatggataggctataaagtaattgtgactgagatgaacttttatgtcttagacactacaacactatattggcagtagttgactgcggggccccaacatagagaaattggattcccaatttctacagacaatgcaagttggggtgggccccaacataaagaaatactttttctttagaaattagtatttcttatgcatgagtgtaactcatgcattcatatttttaagtacacattagctgtgactaatgataaagaatcgctacataatcaatcattagtcgttctttatcatttccgtcccgctctcaataaatgttagtctatcttattattataaatcggatgaatgtgttaatctatggcagattacacgtcatccgattttttatagaatttgaaaaagacgcataaaccactatgatttaaaatacaacatcaatcattttagtggcatgcgccaaaattatatgtctgtttttgaaacagggtaatagcttaaagctaataaaaacgaatataaggtgcgttgaatcttatgattacactccaaacctaatataatatcgggttaagatcattccggatgcttacaaatcattgacagtaagtaactgaatggcatttggtataacctcaatatcaataggtgtttctaatgaaatttcgccatcaatatcaactttcattgctggatctgttgtaagtgaaatctttttaccaggtatatgctcaataccttgagtaatttcattccaattcatgctatcacgctttttaaaaatatcatttaaaatactgaaactttgttcattaaaaatgaaagtgttcagttcaccatcttgaggagacaaatcagtcaatggtatacgactaccaccaatgaatggaccatttgctgttagtatcatggtcgtttcgccagaatatgtcttatcatctattgataattgataattaaattgtgttggatttagcagtgttttgacagttgatccaatataactcaatttaccaaatatatcttttgaaccatcttgtacgttttcagcgttttgaacaatgagacctaagccaacaaagttgagtgcatattgattatttattttaattacatcgtatgtaccaacttgtgcagaaatcatttgttcactagcttgtttatgattaggtgctatatttagcgtttttgtaaaatcattaaaagtaccgcctggtaaaatgccaatagggagttgaaggtcatgtgtcataacaccgtttataagttcgttaaccgtgccatcaccgccaagaataaataatatatctacatcttttgcatagtttttagttttgatttcttggcaatatttaataatgtcaccttcgttttcactcaattgaatagaaagatgcttacaaattgaacttaatgctgttgtaacttccccaataccttgattaatattttttaatccactgtgttcatggtaaaagaggacaccatgtgtatatttattttccatagtttagcctactttctaaaaattggttcattaaatatatatacccacttttaattgttaataccaaaaatatgtttttaaatagagaaaatggtaataaatgaaattgatttctatagagtgggacgagaaaatatagttatagctgtctataatgagcatattaagtttttatttatactgatatcttgaatttaattaatagaaacctataaaaaaacagtaagccatttaaatgacttactgttttttgaattaggccaacaatattaacgtatacctttcatcgctttgatgattaaaggtgagaatgctaatacaattgttgtaacaataattgcaacaacacctaggaaaataaagtaatttgtttgacctagtggttctattaacttaactaaagtaccattgattgcttgtgcagaagcgttagttaagtaccaaatactcatcatttgggcattaaatgctttaggtgctaacttaacagcagcactattacccgttggtgataagcatagctcaccgataacacaaataatgtacgataaaataacccagttaactgaaaagtttgatgaacctgatgcataacctacaataccaattagtatgtatgacgcacctgctaagaacgtaccaattgcaaattttactggcaggctaggttgtttagttccaagcttttgccataaaagtgaaataattggagctagtaataaaataaataatgggttaattgattggaagatcgcttcaccaaagtttgttttccaaccaaataagtttaatttcatatctgaatgttcaattccatatatgtttaatacattagacccttgttcttgaatagcccagaacaccattccaagaataaataatggaataaatgctttaacacgagaacgttcagtatcagtgacatctttacttctaataattaaagtgaagtaaatgattggtaatgcaatacctaatactaaaacagtattactaactaagttaaatgataatgagttagttaatgcaccaataacgataattaatacaattgctaaaacaacacttccgataataagaccatactttttcttttcagctggtgtcaatgggttagtaggtttcataccaacgctacctaagtttttgcggttgaaaagtacataccatactaaacctaatgccataccaactgctgcaatcaagaatccgccgtggaagtttttaacattaacaaagtgttgcaaaataataggtgataataatgcacccatattaactgacatatagaaaataacaaaacctgcatccatacgtctatcattttcaggatataaacggccaacgatatttgaaatgtttggcttcattaaacctgaaccaataatgatgaagaacattgatgtgaataagccgattaatgcaaatggtaagcttaaacaaatatgtccgataataataaagactgcacctaataaagtagcgcctctagtgcctgtaattctgtcagcaatccatccgcctggtattgatgtcatatagattaatgaaccataaactgacataattgacatagctgttgttttatcaattccaaggccattatctgttacggcaaagtacatgtagaaaatgagtagggcacgcatgccataataactaaacctttcccagaactctacaaagaagagtacgcctagtcctcgaggatgcccgaaaaatcctgtttgaggtatgtcttgaatttgatttccatgggagttttgttgtgtcatgtatacatcccatcctttcttcccctaatacaatagtttaagtaaatttgattgtgccttatcaactaaatattccaacaaatcacaaaaaaataaaaatattgagaatattctgttattaagcgcgcacaattaattagagataatataaaaatatacttattgacgttaaagtgcaataggtttctataaaaatgttgtttaattcgtgtactaatattcttttggtgtactttggtataaaatgttattttaatgtaacctattatgtatgctaaatgaaaaacacaccaataagttaggaaaatcaacttattggtgtgtttattaaatgatacatttaacgattatctattttttcgggatataaatcatgattcatcaaacgatgctcagccattttttcatatttagaatttggacgtccatagtttgtataaggatcaatagaaattccaccacgtggtgtgaacttgccccagacttcaatataatgtgggtccataagctctatcaaatcattcataataatattcatacaatcttcgtgaaaatcaccgtgatttctgaaactaaataagtataatttcaaagattttgattcaaccattttaacatttggaatatatgaaatatagatagttgcaaaatctggttgcccagtaattggacataatgatgtaaattctggacagttgaattttacgaaatagtcacgaccttgatgcttattatcaaacgattctaatacatcaggacgatagtcaaaattgtaagtattgtcttgatttcctaataaagttatatcttgtaattcatcttgttgacggccatgtgccatataaagcgctcctttaaatttatttttttattattttggcgtctcggcgtgctttttcaaacatgtaataacttgcaccgataataacgacgtaacctaatgttgcatagaaatctggagattctccgaatagaataaatccaagtattgctgtgaaaattatagatgcatacgtaaaaatagaaatatcttttgctgctgcaaaactatatgctaaagtaacaccaatttgacccacagcggcagctaagccagcccctaatagataaagtatttgcatctgactcattggttcataagtatatgcagtgaaaggtattaaaacgatgacagaaaataaggagaagtaaaatactatagtatatggtgcttctcttgtactaagtgctcgaacacatgtatatgctgatgctgcaaaaatacctgagaataagccagctaatgatggaatcatagatgatgaaaattcaggtttcactattaaaagcatacctaaaatagcaattatcattgctgtaatttgatacttccttaccttttcatgtaagaaaacaatgcttaataaaatcgtccagaaaggattgagtttcattaatgaatcggcatcactaagtaccatatgatcaatggcataaatatttaacaatacaccaataagtccaagtgttgatcgtgttattaataagggttgacttgaaagtctgccaaacattggctgatggtatttatatataaaaaataatggaataaacattgctactaagtttcgtgctaatgatttttgaaaaacaggaaggtcacctgcaagtctgaaaaacactgacataaaactgaaaccaatagccgaaattaaaatggcaatgataccttttactttaggattcaattttatcgcctcttttatataaaattaacgtatttatattagcataaaacaacatgttgtgcataaatagttgaaatttactataaaaagactataatagactgtagcgaacaaacgttctgtgtttatttgtcggaataatagggcattacacttttatgaatgtttgtgttattacataaaacaaatatcaattcagtatcaagctaataagctttttcttgatttctgttgatacaattgagattgacacagatttaaaaaaatcaagtgatatctactaaaaaatttttttaaatttgttcaagtttttctaatttagtattggtgcctagttggaacgttttacgaacattcgattagaaaatggcactttaaatcatagtgtgtcttatgtataatgaaacacataatatagtgttggtgaaacgaaaaagacacaatatcttgtgttttgtatgcaaatgctttatttatgaagaaattacatttaaaagtaatttaacacagaaatttaatagttattatcaattaatagtcatatttttagaaaatgtactgagcaaatggaagatatccaatgatgtaaacactacatatagtgatttttatacattcaacccatataagctactattttctcaaatataaatctatgcaattggtttacatttgagaaaataagtagcttcattatagttaatacaatgctgagataaccatagtaaccatgttgttaaagcattttttaattggaatgactactttatttaaaagggttgaagaaagaaggtgatccaatgaaaataatatatttttcatttactggaaatgtccgtcgttttattaagagaacagaacttgaaaatacgcttgagattacagcagaaaattgtatggaaccagttcatgaaccgtttattatcgttactggcactattggatttggagaagtaccagaacccgttcaatcttttttagaagttaatcatcaatacatcagaggtgtggcagctagcggtaatcgaaattggggactaaatttcgcaaaagcgggtcgcacgatatcagaagagtataatgtccctttattaatgaagtttgagttacatggaaaaaacaaagacgttattgaatttaagaacaaggtgggtaattttaatgaaaaccatggaagagaaaaagtacaatcatattgaattaaataatgaggtcactaaacgaagagaagatggattctttagtttagaaaaagaccaagaagctttagtagcttatttagaagaagtaaaagacaaaacaatcttcttcgacactgaaatcgagcgtttacgttatttagtagacaacgatttttatttcaatgtgtttgatatttatagtgaagcggatctaattgaaatcactgattatgcaaaatcaatcccgtttaattttgcaagttatatgtcagctagtaaatttttcaaagattacgctttgaaaacaaatgataaaagtcaatacttagaagactataatcaacacgttgccattgttgctttatacctagcaaatggtaataaagcacaagctaaacaatttatttctgctatggttgaacaaagatatcaaccagcgacaccaacatttttaaacgcaggccgtgcgcgtcgtggtgagctagtgtcatgtttcttattagaagtggatgacagcttaaattcaattaactttattgattcaactgcaaaacaattaagtaaaattgggggcggcgttgcaattaacttatctaaattgcgtgcacgtggtgaagcaattaaaggaattaaaggcgtagcgaaaggcgttttacctattgctaagtcacttgaaggtggctttagctatgcagatcaacttggtcaacgccctggtgctggtgctgtgtacttaaatatcttccattatgatgtagaagaatttttagatactaaaaaagtaaatgcggatgaagatttacgtttatctacaatatcaactggtttaattgttccatctaaattcttcgatttagctaaagaaggtaaggacttttatatgtttgcacctcatacagttaaagaagaatatggtgtgacattagacgatatcgatttagaaaaatattatgatgacatggttgcaaacccaaatgttgagaaaaagaaaaagaatgcgcgtgaaatgttgaatttaattgcgcaaacacaattacaatcaggttatccatatttaatgtttaaagataatgctaacagagtgcatccgaattcaaacattggacaaattaaaatgagtaacttatgtacggaaattttccaactacaagaaacttcaattattaatgactatggtattgaagacgaaattaaacgtgatatttcttgtaacttgggctcattaaatattgttaatgtaatggaaagcggaaaattcagagattcagttcactctggtatggacgcattaactgttgtgagtgatgtagcaaatattcaaaatgcaccaggagttagaaaagctaacagtgaattacattcagttggtcttggtgtgatgaatttacacggttacctagcaaaaaataaaattggttatgagtcagaagaagcaaaagattttgcaaatatcttctttatgatgatgaatttctactcaatcgaacgttcaatggaaatcgctaaagagcgtggtatcaaatatcaagactttgaaaagtctgattatgctaatggcaaatatttcgagttctatacaactcaagaatttgaacctcaattcgaaaaagtacgtgaattattcgatggtatggctattcctacttctgaggattggaagaaactacaacaagatgttgaacaatatggtttatatcatgcatatagattagcaattgctccaacacaaagtatttcttatgttcaaaatgcaacaagttctgtaatgccaatcgttgaccaaattgaacgtcgtacttatggtaatgcggaaacattttaccctatgccattcttatcaccacaaacaatgtggtactacaaatcagcattcaatactgatcagatgaaattaatcgatttaattgcgacaattcaaacgcatattgaccaaggtatctcaacgatcctttatgttaattctgaaatttctacacgtgagttagcaagattatatgtatatgcgcactataaaggattaaaatcactttactatactagaaataaattattaagtgtagaagaatgtacaagttgttctatctaacaattaaatgttgaaaatgacaaacagctaatcatctggtctgaattagcagatgattagactgctatgtctgtatttgtcaattattgagtaacattacaggaggaaattatattcatgatagctgttaattggaacacacaagaagatatgacgaatatgttttggagacaaaatatatctcaaatgtgggttgaaacagaatttaaagtatcaaaagacattgcaagttggaagactttatctgaagctgaacaagacacatttaaaaaagcattagctggtttaacaggcttagatacacatcaagcagatgatggcatgcctttagttatgctacatacgactgacttaaggaaaaaagcagtttattcatttatggcgatgatggagcaaatacacgcgaaaagctattcacatattttcacaacactattaccatctagtgaaacaaactacctattagatgaatgggttttagaggaaccccatttaaaatataaatctgataaaattgttgctaattatcacaaactttggggtaaagaagcttcgatatacgaccaatatatggccagagttacgagtgtatttttagaaacattcttattcttctcaggtttctattatccactatatcttgctggtcaagggaaaatgacgacatcaggtgaaatcattcgtaaaattcttttagatgaatctattcatggtgtatttaccggtttagatgcacagcatttacgaaatgaactatctgaaagtgagaaacaaaaagcagatcaagaaatgtataaattgctaaatgacttgtatttaaatgaagagtcatacacaaaaatgttatacgatgatcttggaatcactgaagatgtgctaaactatgttaaatataatggaaacaaagcactttcaaacttaggctttgaaccttattttgaggaacgtgaatttaacccaatcattgagaatgccttagatacaacaactaaaaaccatgacttcttctcagtaaaaggtgatggttatgtattagcattaaacgtagaagcattacaagatgatgactttgtatttgacaacaaataacaattaaattaaaagaccttcacatgtaaagggaaatagcgattcgtttcgtcttgtctcctacatgttgaaggtctttttttatgtgtatctaactcattatgagtctgagtaagaaatcaatgctctaagatgtacaatgctatttatattggcagtagttggcggggccccaacacagaagcaggcggaaagtcagctaacaatattgtgcaagttggcggggccccaacatagaagcaggcggaaagtcagctaacaataatgtgcaagttggcggggccccaacataaaagcaggcggaaagtcagctaacaatattgtgcaagttcgggcggggccccaacataaagaaaaactttttcctttagaaattatcacttccacatgagttttactcatgtattcctatttttaagtacacattagctgaggctaatgttaagaaccactacttaatcaatcattagtagtttttatcatttccactattcccagacatcaaaatcttaagtgttctattttactttaagtaaacaaaatacacattccgaaaaattaaatttcagtttaattgcaaatatcaataaaattgacactaaattatttgaaaggctattgaaattatggtcaaaaaacgctactattaatgagaaatattatcaatgataatgattatcattaatttaaagggagaaaaatttgtaatgaagtatttattaaagggaaatattttgcttctattactaatattgttgacaattatttcgttgttcataggtgtgagtgaactatcaattaaagatttactacatttaactgagtcacagcggaatattttattctcaagccgaataccaaggacgatgagtattttaattgctggaagttcgttggctttagcaggcttgataatgcaacaaatgatgcaaaataagtttgttagtccgactacagctggaacgatggaatgggctaaactaggtattttaattgctttattgttctttccaaccggtcatattttattaaaactagtatttgctgttatttgcagtatttgcggtacgtttttatttgttaaaatcattgattttataaaagtgaaagatgtcatttttgtaccgcttttaggaattatgatgggtgggattgttgcaagtttcacaaccttcatctcattgcgcacgaatgctgttcaaagcattggtaactggcttaacgggaactttgccattatcacaagtggacgctatgaaattttatatttaagtattcctcttttagcattgacatatctttttgctaatcatttcacgattgtaggaatgggtaaagactttactaataatttaggtttgagttacgaaaaattaattaacatcgcattgtttattactgcaactattacagcattggtagtggtgactgttggaacattaccgttcttaggactagtaataccaaatattatttcaatttatcgaggtgatcatttgaaaaatgctatccctcatacgatgatgttaggtgccatctttgtattattttctgatatagttggcagaattgttgtttatccatatgaaataaatattggtttaacaataggtgtatttggaacaatcattttccttatcttgcttatgaaaggtaggaaaaattatgcgcaacaataataaaaaaataatgcttttaattgcagtaacgttattaattagtatgctgtacttatttgtaggtattgattttgaaatatttgaatatcaattttcaagtcgtttaagaaagttcatattaattattttagtaggtgctgccattgcaacttcagtggtgatttttcaagcgattacaaataaccgtctattgacaccatcaataatggggttagatgcagtttatttatttatcaaagtattgccagtctttttatttggaattcaatcggtatgggttactaatgtatatttgaactttatattaacacttataacgatggtgttattcgcactaatcctattccaaggtatctttaaaatcggacatttttcaatttattttatcttacttattggtgtccttttaggaacattttttagaagcataacaggttttattcaactgattatggatcctgagtcatttttagcaatacaaagtagtatgtttgctaattttaatgcttctaattcgaatttagttactttctcagcagtgctattagtaatcttattagtcattacaattttactattgccttatttagatgtattgcttttaggtcgtgctgaagcaattaatcttgggatatcgtatgaaaaattaacgcgaattctacttgtaatagtctcagttttagtttctgtgtcaactgcattagtaggaccaattacatttttaggtttattaactgtaaatctagcgcatgaactaatgaagacgtatgaacataagtatattttaattgcgacaatttgcttgagttggattagtttatttagtgcgcaatgggtagttgaaagtgtgtttgaagctacgacagaaatgagtatacttattgatttgattggtggaagttatttcatttatctattagttagaaggagaaatgcgcaatgattcaagttgaaaatttaactaaaactataaataatcaaatgatattggaagatattagcatagatatcgaaaaaggtaaattgacttctttaattggacctaatggtgcgggtaagagtactttactttcagcgatatgtaggttaattcgttttgagaacggtgaagtgaaaatagatggacagctcatgtctgattataaaaataatgacttgtcgaaaaaaatatctatattaaaacaaacaaaccatactgaaatgaatattacggtagagcagttggtaaactttggacgattcccttattctaaaggtcgtttgacgaaagaggatcatgatattgtcaatgatgcgctagatttgttgcaactacaagatatcagaaatcgtaatattaagtcattatctggtggacaacgtcagcgtgcatacattgcaatgacaatagcacaagatactgaatatattttgctagatgaaccattaaataatttagatatgaagcatgctgttcaaattatgcaaacgttaaaaatgttagcgcataaaatgaataaagcgattgtcattgtgttacatgatattaactttgcgtcctgttattcagatcagattgtagcattgaaaaacggacaactagttaagtcagatttgaaagataatgtcattcaaagtagtgttttaagtgatttatatgacatgaatattcaaattgaacatataagaaatcaaaggatttgtttatattttaaggattgataatttggagacactttaaaggggtgatgcgccaattaaagaagggttaaacgtaaagcatttatttatatttcacatcaagcacacagattaagccaaaagaggagaatattatattatgaagaaaacagtcttatatttagtattagcagtaatgtttttattagcggcatgcggtaacaattctgataaagaacaatcaaaatcagaaactaaaggttctaaagatacagtaaaaattgaaaataactataaaatgcgtggcgagaaaaaagatggtagtgacgctaaaaaagttaaagaaactgttgaagtaccaaaaaatcctaaaaatgcagttgtgttagactatggcgcattagatgtaatgaaagaaatgggcttatcagataaagtaaaagcattacctaaaggggaaggcggtaagtcattaccgaatttcttagaatcatttaaagatgataaatatacaaacgttggtaatttaaaagaagtgaattttgataaaattgctgcgacgaaacccgaagtaatctttatctctggacgtacagctaatcaaaagaatttagatgaattcaaaaaagctgcacctaaagcgaaaattgtttatgttggtgcagatgaaaagaacttaattggttcaatgaaacaaaacactgaaaatatcggaaaaatttacgataaagaagataaagctaaagaattaaataaagatttagataacaaaattgcttcaatgaaagataaaacgaaaaacttcaataaaactgttatgtatttactagttaacgaaggtgaattatcaacatttggacctaaaggtcgttttggtggattagtttacgatacattaggattcaatgcagttgataaaaaagtaagtaatagcaatcatggacaaaatgtttctaacgaatatgttaataaagaaaatccagatgttattttagcgatggatagaggtcaagcgataagtggtaaatcaactgcgaaacaagcattaaataatcctgtattaaaaaatgttaaagcaattaaagaagacaaagtatataatttagatcctaaattatggtactttgcagctggatcaactacaactacaattaaacaaattgaggaacttgataaagttgtaaaataattttaaaagaggggaacaatggttaaaggtcttaatcattgctcccctcttttctttaaaaaaggaaatctgggacgtcaatcaatgtcctagactctaaaatgttctgttgtcagtcgttggttgaatgaacatgtacttgtaacaagttcatttcaatactagtgggctccaaacatagagaaatttgattttcaatttctactgacaatgcaagttggcggggcccaaacatagagaatttcaaaaaggaattctacagaagtggtgctttatcatgtctgacccactccctataatgttttgactatgttgtttaaatttcaaaataaatatgatagtgatatttacagcgattgttaaaccgagattggcaatttggacaacgctctaccatcatatattcattgattgttaattcgtgtttgcatacaccgcataagattgctttttcgttaaatgaaggctcagaccaacgcttaatggcgtgcttttcaaactcattatggcacttatagcatggatagtatttattacaacatttaaatttaatagcaataatatcttcttcggtaaaataatggcgacagcgtgtttcagtatcgattaatgaaccataaactttaggcatagacaaagctccttaacttacgattcctttggatgttcaccaataatgcgaacttcacgatttaattcaatgccaaatttttctttgacggtcttttgtacataatgaataaggttttcataatctgtagcagttccattgtctacatttaccataaaaccagcgtgtttggttgaaacttcaacgccgccaatacggtgaccttgcaaattagaatcttgtatcaatttacctgcaaaatgaccaggcggtctttggaatacactaccacatgaaggatactctaaaggttgtttagattctctacgttctgttaaatcatccattttagcttgtatttcagtcattttaccaggagctaaagtaaatgcagcttctaatacaactaagtgttctttttgaataatgctattacgataatctaactctaattcttttgttgtaagtttaattaacgagccttgttcgtttacgcaaagcgcatagtctatacaatctttaacttcgccaccataagcgccagcattcatatacactgcaccaccaattgaacctggaataccacatgcaaattcaaggccagtaagtgcgtaatcacgagcaacacgtgagacatcaataattgcagcgccgctaccggctattatcgcatcatcagatacttcgatatgatctagtgataataaactaattacaataccgcgaataccaccttcacggataataatatttgagccatttcctaaatatgtaacaggaatctcattttgataggcatatttaacaactgcttgtacttcttcatttttagtaggggtaatgtaaaagtcggcattaccacctgttttagtataagtgtatcgttttaaaggttcatcaactttaattttttcatttgggataagttgttgtaaagcttgatagatgtctttatttatcacttctcagtacatcctttctcatgtctttaatatcatatagtattataccaattttaaaattcatttgcgaaaattgaaaagaaagtattagaattagtataattataaaatacggcattattgtcgttataagtattttttacatagtttttcaaagtattgttgcttttgcatctcatattgtctaattgttaagctatgttgcaatatttggtgtttttttgtattgaattgcaaagcaatatcatcattagttgataagaggtaatcaagtgcaagataagattcaaatgtttgggtattcatttgaatgatatgtagacgcacctgttgttttagttcatgaaaattgttaaacttcgccatcataactttcttagtatatttatgatgcaaacgataaaaccctacataatttaagcgtttttcatctaaggatgtaatatcatgcaaattttctacacctactaaaatatctaaaattggctctgttgaatatttaaaatgatgcgtaccgccaatatgttttgtatattttactgggctgtctaagaggttgaataataatgattcaatttcagtgtattgtgattgaaaacaattagttaaatcactattaatgaatggttgaacatttgaatacatgataaactcctttgatattgaaaattaatttaatcacgataaagtctggaatactataacataattcattttcataataaacatgtttttgtataatgaatctgttaaggagtgcaatcatgaaaaaaattgttattatcgctgttttagcgattttatttgtagtaataagtgcttgtggtaataaagaaaaagaggcacaacatcaatttactaagcaatttaaagatgttgagcaaaaacaaaaagaattacaacatgtcatggataatatacatttgaaagaaattgatcatctaagtaaaactgatacaactgataaaaatagtaaagaatttaaggcactacaagaagatgttaaaaaccatctcatacctaaatttgaagcatattataagtcagcaaaaaatttgcctgatgatacaatgaaagttaagaaattaaaaaaagaatatatgacgcttgcaaatgagaagaaggatgcgatatatcaattaaaaaaattcataggtttatgtaatcaatctatcaagtataacgaagacattttagattatacgaaacaatttgaaaaaaatagatacaaagttgaatcagaaattaaattagctgataataaaagtgaagcaactaatcttacgacaaaattagaacataataataaagcgttaagagatactgcgaagaagaacctagatgatagtaaagaaaatgaagtaaaaggcgcgattaaaaatcacattatgccaatgattgaaaagcaaattaccgatattaaccaaactaatattagtgataagcatgttaataatgcaaggaaaaacgcaatagaaatgtattacagtctgcagaactattataatacacgtattgaaacaataaaggttagtgagaagttatcaaaagtcgatgtagataagttgccgaaaaagggtatagatataactcacggcgataaagcctttgaaaaaaagcttgaaaaattagaagaaaaataactataatcatttttcaaagttaaaaattttgaatttatggttaacatgtcaacttactatgtgtataatggtaaacattgatattaactatatgtataaaaatgtcacgcagatgctatttaaatgtgataaatatttttagaggtgaatagagtggctataaagctaagttcaattgaccaatttgaacaggttattgaggaaaataaatatgtttttgtattaaaacatagtgaaacttgtccaatatcggcaaatgcgtacgatcaatttaataaatttttatatgaacgcgatatggacggttattatttgattgtccaacaagaacgcgatttgtcagattatattgctaaaaaaacgaacgttaaacatgaatcacctcaagcattttattttgtaaatggtgaaatggtttggaatcgagaccacggtgatatcaatgtgtcgtcattagcacaagcagaagaataatgaaactatagggttggaacattttgccttacactactagacgtgaatagcacaacttaaattcgtgtgaatcagagtagtttggctataatgatgttctgaccttttattttatgtcacctttagaagcagttaagttagtacttttttacaaacatatgtataatatattcgagtatttttattgaaaatattttggaaaacgacgaatccaataagaaaatttaaacatgatttgtaagttagtttaataggaaatatatgctaaaccaaaagaagcatattgttatttactggaataattaataatcatgtcatgttaaatgttagcatataatcacgagataaaatctaaaatttaagattaatcttttatgaataaaaaacgtatcacaacaaataataaagtaaggtggtcaaggttatgaaagtattagtagccatggatgagtttcatggaattatttcaagttatcaagctaatagatatgttgaagaggcagttgcaagccaaattgaaactgcagatgtagttcaagtaccattgtttaatggaagacatgaattattagattctgtatttttatggcaatctgggcaaaagtatcgtataccagtacatgatgcagatatgaatgaagttgaaggtgtttacggacaaactgatacagggatgaccgttatcgaggggaatttatttttaaaaggtaaaaaaccaattgttgaacgaacaagttatggtttaggagaaatgattaaacatgcattagataacgacgcaaaacatgttgtaatttcactaggtgggattgatagttttgatgctggtgcaggtatgttacaagcattaggtgctcaattctatgatgacgaagggcgtgtcgtagatatgagacaaggtgctggtgtaattaaatatattcgtcgtatggatatgtcgaacttacaccctaaaatggaaacagcaagaattcaagtaatgtcggatttttcaagtcgattatatggtaagcaaagtgaaatcatgcaaacttatgatgcgcatcagttgaatcataatcaagcagcagaaatcgataatttaatttggtattttagtgagttatttaaaagtgaattgaaaattgcaattggtccagttgaacgtggtggtgctggtggtggaattgcagcagtcttgaatggactgtatcaagctgaaatattaaccagtcatgcattagtagaccaactaacacatttagaaaatttagttgaacaagcggatttaattatttttggagaaggattaaatgaaaatgatcagttgctagaaacgacaacattgcgtattgcagaactttgtcataaacatcaaaaggttgccattgcaatttgtgcaactgctgaaaagtttgatttatttgaatcacaaggggttacagcaatgtttaatacatttatcgatatgccagaaacttatactgactttaaaatggggttacaaattaggcattatacggttcagtctttaaaactgttgaaaacacattttaatgttgaggtttagtaaagaaggactaaattggtgatgctgtcatgatggttaataacatttatgatggttagcaaaacgaattagaagatcgaaagtatacgtaaaaaatatgaaaaatcacgctatcattgcactgaatgttagcgtgatttttatatattaattaagcctgagttgaactagtatataatcgttggtttttagtgattttcagcgatatcttctacaattccaatgattacttgtactgctttttccataacatcaatggatgcatattcatatgggccgtggaagttaccgcaacctgtaaagatgtttggagttggtaaccccataaatgacaattgtgaaccatctgtaccaccgcgaataggttcagtgtttgctggaatatctaatttggcaaagacacgtttaggtatatcaataatatgaggcaatggtaatattttttctgccatattgaaatattgatccgatatatcaactttaactggataattttcaaaatgggcattgatatcgtcacgtatttctaaaatacgtttcttacgcaattcgaattgttttttatcatgatcacgaataatgtattgcaaagttgctttttcaacagttccttcaaagttcattaagtgataaaagccttcgtatccttctgttcgctccggaacttcactatcaggtagcaaactatcgaattgttcacctaaacgtattgcgtttaccattgcatttttagctgaaccaggatgaacatttacaccgtggcatgtaataaccgcttcagcagcgttaaagctttcatattgtaattctccatattgactaccatccatagtataagcaaaatcagcattgaagcggtcaacatcaaatttatgtggaccacgaccgatttcttcgtctggtgtaaatccaatgcgaatggtaccatgtttaatttctggatgttcttgtaaataacaaatagcttccataatttccacaatacccgctttatcgtctgcacctagtaacgatgtaccatcagttaccattaatgtatgaccaactaaactgttaagttctggaaatactttaggatctaagacacgtttagtattgcctagtttgtatggcttaccatcatagttttcaataatttgcggtttaacatttgaagcattgaaatcaggtgatgtatcaacatgcgccaaaaatccaactgttgggacgtcgacatcgatgttactttctaatgtagcaaataagtagccattttcatctaaatcagttggcaatcctaattgttgtaattctttttctaataaatgtaacaaatcccattgcttttcagttgaaggtgttgttgtagattttggatcagattgcgtatcaattgtcgtatatcttgttaatctatctatcaattggttcttcattatattcgaccccttaaactctattattcatgttgtaagattttttatatgtcttacctttgattttaccatacagttgtttgatacgtgtgtataggtaatatagaatttcagaaactaatataccgaaagcaatcgcacctgaaatcagtgtaacttctaaaaatgtatttacagcacttgtataatcatttgatactaaaaaacgagtcgcttgataagctgcaccaccaggtactaatggtataatgcctggcactatgaatataattaccggtcgtttatatctgcgactcatagtatgactcattaagcctaaaattaagcttcccaaaaatgaagcgccaacttttccaaactctaaatctaccgttaattggtaaatcgtccatgcaatggcacccacaaatccacatgctactaagaggcgtttgggtgcattgaaaatgatagagaaaagtactgttgatataaagctgattgtaaaatgaaataaataaaatagcatgctttaacagtccttccttaaatgattaataaaacgattgcgacaccagcaccgattgcgaatgctgttaatgcagcttcaacaccgcgagacatacctgcaagtaattcacccgctaataaatctcgaatggcattggtaattaatataccagggacaagtggcatgacactggctatagtaatgatatcttgattggttgcaatgcctaatttagtaaatgtggctgcaatggatatgaccacagcggctgcaacaaactctgagaaaaatttaatttgtatatagcgttgcacaaagctgaatgttaaaaatgcggatccgccagcaatgactgcaatccaacaatctgatgcgacaccaccaaacataaataggaagaagccacatgcaatggcagctgcaaagaaattcgttaaaaaagaatattgtaatgatgcatgctgtaaatgaataaattcagatttagcttcatcaattgtgagttctttatttgatattttacgtgaaagactattcgttaaagcgattttctctaaatctgttgtacgctcttgtacacgaattaatcttgtacttgttcgatcgtttaatgaaaaaataattgcagttgaactgacaaaactatatgtattatgaagaccataactatgtgcgatacggttcattgtatcttcaactcgatatgtttcagcacctgattcaagtaaaattctacctgcaattaatacaacatcaatcactttgttttcatctataattgtgattgaatctggcatatcaattcacctccaatgatatgtgttatttatttgaacaattgaagtttacaacttgttgttacaactttcaatagtgagactttgtgttagtatgatgaacttgtatggttcaaatttaaataagaaaaactgttaatctttgctattatactatgatttaataatagcaaaggattaacagttttgtcgttgttataaattgataatagggttaaacattactttgtttcgcccttgatttttggctacatgcaccatatcgtctgcatctttaaacactttacgctgtgattttggatcgtcatctgttaaataaccaacaccgatagacactgacaatttaataacttctttgtttggtaaatggaatgatgatttttcaacacccgaacgaatattttcagctaatttaacactttgatcaagtgaataattgtgaatgacaactgagaactcttcgccaccatttctaaaaattttaaattgattcggcacatagtttttaagtaattgagacatttgttttaatacagcatcacctgatttgtgtgagtaggtatcattgacatctttaaatccatcgatatcgattaataataatgcgatactttgatgttctttttcagcttttcgtgaaatttcatttaaatgtctatcaaattcttttacattacctaagcctgttaagtaatcatatttatcttcgttttcataacgatttacgagtgagaagaaatgccaaatatcgacaaatgttatcgctgaagctaaagtgataattaatgaaattggtattaaaatgataacttccgatagtgtgtaaataggactcactaacgcgacaccaaataaaatgattattgtaacaacattaagtattaataatgatagcacatcattttgttttaaaaatggtccaatagcacttgttactgcagcaataacaatcaacgtaacaccgtacataatcgagttgttaaatactacaatttcaacaattgctacaattactgtggcagataatgtatagaccatatttgtaaatctacctaaaaacaataaaggaacgaatgttaagtgaattaaataatcttcacgataagggatagggtagacagataataataatgatacgattgtcattaaaacagtgacataagccttagaaaaaaccatacgtttgttttctgaatactgtaagcgatggaataaatagattccagcgactataacagatatattgtatataaatgcttcgaacatgtctgaatcgactcctttaattgaccactagctattgtaagtgaaaacttacaatttgtcattagtttacatataaaattaatgtatgatatagactttgatgttaaaatgttgccttaaatgatatgatgaaaaaatgaataataggcgatatataagaaatgaatcgtatagttgtaaatatgatatcattgattgaacgaattaatttataataaagctataagatatacgtagaaaatagatatatcattctataaagacaatattaaataaatataacgttaaaaacaattaatatcgatgaaggtgaataaatggttacattattactagttgcagtaacaatgattgtcagtttgacgataacaccaattgttattgcaatatcgaaaagattaaatttagttgataaaccaaattttagaaaagtacacactaaacctatttcagttatgggtggtacagtgattctcttttcatttttaataggtatttggattggtcatcctattgaaacagaaatcaaaccacttattattggtgcgattattatgtacgtacttgggcttgtagatgatatctacgatttgaaaccgtatataaaattggctggtcaaattgccgctgccttagtagttgctttttatggtgtgactattgattttatttcgttgccaatgggtacaacgattcattttggatttcttagtattccaattactgtgatttggattgttgctattacaaatgcaattaacttaattgatggactcgatggtttggcgtcgggtgtttctgcaatcggactcattacaatagggttcattgcaattttacaagctaatattttcataacgatgatttgttgtgttttattaggctctttaattgggtttttattttacaatttccatcctgccaaaatatttttaggtgatagtggggctttaatgattggatttatcatcggattcctttctttactcggattcaaaaatattacaattattgcattgttcttcccaattgttatcttagcagttccattcattgatactttgttcgcaatgattcgacgtgtgaaaaaagggcagcatataatgcaagctgataaatcgcatttgcatcataaactattagctttaggctacacacatagacaaacagtattattaatctattcaatctctattttatttagtctttcgagcattattttgtatgtatcgccaccattaggtgttgtattaatgtttgtattaatcatatttagtattgaattaattgttgaatttacaggattaatagataacaactaccgaccaatattaaatttaattagtcgtaagtcatctcataaagaggaatagggaatgaaagcatagctgtatgggataatttgtattatatggctttactctttacaatttttttgtattaaatttcaaatataaaaagcactgccataaacgtgtacttcaattgtcgtttaataatacgcaattgatatttaccgtcttatgatagtgctttttatttttattcagttggtatatcgaaaggtaactgctttggagtttcttcagtcaaatcgaaatttcctgcagtcatttgatttaaaaagttaataaacgcttcatagtcacttttaacgacatcgatatagtagcttaccttatcagtgtaagtttggtttcttaacataaaatgagttgaagctaattcatattcaaatttaccagtttgatcataattcagtgttactatacatggtactgcttctcgtagttcgacacgcccgatatcataaatgacgtctctaacagcaccgctataggcgcgaattaaaccgccaccacctaatttaataccaccaaaatatcttgttactacgacacacgcattatgaacatcgagcttttttaatatgtctaacattgggacaccggcagttcctgtcggttcaccatcatcattcgctttttgaatattcatttcaggtccaatagtatatgcagaacaattatgagtggcatctttatgttctttttttattgcagcaataaatgctttagcttcatcttcattttgaacaggtttgatatgagcaatgaatcttgatttactaatcacattttcaataatgtgttcttttttaacagtaatgatattttgtgtcataataactccttaattcataagcttaagattatttaatcttcattatacactgaaaatgacatgactataaatcgtttgattgccattttctttttaactgaaatattgtatcattgctatgagtatattttaggaggacgactatgaaaattgctgtgatgaccgattctacaagttatctgtcgcaggacttaatcgataaatataatattcaaatagcgccattaagtgtgacttttgaagatggcaagattataccagaagaaaaagttcgtactaaaaagcgtgccattcaaacattagaaaagaaagtattagatattgtaaaagactttgaagaagtaactttatttgtcataaatggagatcatttcgaagatggtcaagcgttatacaaaaagttacaagatgattgtccttcagcttatcaagtagcatactctgagtttggtccagttgttgcagcacatttaggttctggtggattaggtttaggctatgttggcagaaaaataagattaacataattataaaattttaataaaagagtctatattgtaattggaaattatctctcgtatacatggctttaaatgttcatcatttgaaagccaaaatgctaaagatataagaaaatcattataatattaggctcttttttacgttgaaatgaggttttaagcattaaacattacgggaaattaattcatcctcatacttcacttactaatgaaaaaattaaaaaagaagtaacaggtgtcatcaaacaaaattcaaactattattgtgttcaatgtgaaagtacaaatccaaagcatttttatcagtatgattcctcagtacattccaagaaaattgtatattgcagaaattgtatatcactgggtcgaatggataatgtaacaagatataaaataacagagagttcgcaaagttcatcacaagcatattatcatctctcatttgaattgtcggaacagcagtcttatgcctcagaacatattgttcgagccattagaaagagacaaacgattttgttatatgccgtaacaggtgcaggtaagacagaaatgatgtttcaaggcattcaatatgcaagaatacagggagataatatagctattgtgtcaccacgtgtagatgttgttgtagaaattagtaaacgtattaaagacgcatttcttaatgaagatatagacatactacaccagcaatcaagacaacaatttgaagggcattttgttgtatgcacagtgcatcaactttaccgattcaaacagcactttgatactatttttattgatgaagtcgatgcctttcctttatcaatggataaaaatttacaacaagcattgaagtcatcttctaaagttgaacatgcaacaatttatatgacagcaacaccaccgaaacaacttctgtcagagattccccacgaaaatataattaaattgccagctcgctttcataaaaaatcacttccagttcctaaatatcgttatttcaaacttaataataagaagattcagaaaatgttataccgaattttacaagatcaaattaataatcaacgttatacactggtgttttttaacaatatagaaacaatgattaaaacattttcggtttataagcagaaaattactaaattaacatacgtccatagcgaggatgtttttcgctttgaaaaagttgaacaattaaggaatggacatttcgatgtcatttttactacgacaatattagaacgtggatttacaatggcaaatttggatgttgttgttatcgatgcacatcaatatactcaagaggctttaatacaaattgctggacgtgttggacgaaaattagaatgtcctactggaaaagtattgttttttcatgaaggggtaagtatgaatatgattcaagctaaaaaagagattcaaaggatgaacaaattagcattaaaaagaggttggattgatgaataattgtttgagttgtggtgctaagttatatgaaaatataaccatttataatttgttcaagaaacctaatagattatgtgacagatgcaaagagaattgggacaatattaaacttgatattaaagcaaggcgatgttcaaggtgcttaaaacacttaaatcaagatgaagcgtattgtttagactgcaagtttctatcggcacactttaatttaatggaacaattatattgtcaatttcaatatgacggtttaatgaaagagatgatacatcagtataaatttttgaaagactattatttatgtgaattattggcacatttgattgaaataccacaaacatcttatgactatattgtgccaattccttcttcgccggcacatgatttatctagaacatttaacccggtagaagcagtactaaaagctaaagggattcgctttgataagattttaaagatgtcaaatagaccaaaacagtctcatttaactaagaaagagcgtctggcagatgaaaatccatttattattgatacggaattagatttaaatggtaaggaaatattactcgttgacgatatttatacaactggattaacaattcatcgtgcagggtgtaaattatatgctaaaaatatcagaaaattcaaagtgtttgcgtttgcacgatagcgtaaaaatgttaaaatataataaagagttaccaataaagaggtttaaggagagattactatgattagatttgaaattcatggagataacctcactatcacagatgctattcgcaactatattgaggaaaaaattggtaagttggaacgttattttaatgacgtaccaaatgcagtggcgcatgttaaagttaaaacttattcaaattcagctactaaaattgaagtaacaattccattgaaaaatgttacgttaagagctgaagagcgaaacgatgatttatacgcaggtattgatttaattaataataaacttgaaagacaagttcgaaaatataaaacacgtattaatcgtaagagccgtgatcgaggagatcaagaagtgtttgttgccgaattacaagaaatgcaagaaacacaagttgataatgacgcttacgatgataacgagatagaaattattcgttcaaaagaattcagcttaaaaccaatggattcagaagaagcggtattacaaatgaatctattaggtcatgacttctttgtattcacagacagagaaactgatggaacaagtatcgtttaccgccgtaaagacggtaaatatggcttgattcaaactagtgaacaataaattaagtttaaagcacttgtgtttttgcacaagtgcttttttatactccaaaagcaaattatgactatttcatagttcgataatgtaatttgttgaatgaaacatagtgactatgctaatgttaatggatgtatatatttgaatgttaagttaataatagtatgtcagtctattgtatagtccgagtcgaaaatcgtaaaatatttataatataatttattaggaagtataattgcgtattgagaatatatttattagtgataaacttgttgacaacagaatgtgaatgaagtatgtcataaatatatttatattgattctacaaatgagtaaataagtataattttctaactataaatgataagatatattgttgtaggccaaacagttttttagctaaaggagcgaacgaaatgggatttttatcaaaaattcttgatggcaataataaagaaattaaacagttaggtaaacttgctgataaagtaatcgctttagaagaaaaaacggcaattttaactgatgaagaaattcgtaataaaacgaaacaattccaaacagaattagctgacattgataatgtcaaaaagcaaaatgattatttagataaaattttaccagaagcatatgcacttgttagagaaggctctaaacgtgtattcaatatgacaccatataaagttcaaattatgggtggtattgcaattcataaaggtgatatcgctgagatgagaacaggtgaaggtaaaacattaacagcgacaatgccaacatacttaaatgcattagctggtagaggtgttcacgttattacagtcaatgaatacttatcaagtgttcaaagtgaagaaatggctgagttatataacttcttaggtttgactgtcggattaaacttaaacagtaagacgacagaagaaaaacgtgaagcatacgcacaagacattacttacagtactaataatgagctaggttttgattacttacgagataacatggtgaattattctgaagatagagtaatgcgtccattacattttgcaatcattgatgaggttgactcaattttaatcgacgaggcacgtacgccattaattatttctggtgaagctgaaaagtcaacgtcactttatacacaagcaaatgtttttgcgaaaatgttaaaacaggacgaagattataaatacgatgaaaaaacgaaagctgtacatttaacagaacaaggtgcggataaagctgaacgtatgttcaaagttgaaaacttatatgatgtacaaaatgttgatgttattagtcatatcaacacagctttacgtgcgcacgttacattacaacgtgacgtagactatatggttgttgatggcgaagtattaattgtcgatcaatttacaggacgtacaatgccaggccgtcgtttctcggaaggtttacaccaagctattgaagcgaaggaaggcgttcaaattcaaaatgaatctaaaactatggcgtctattacattccaaaactatttcagaatgtacaataaacttgcgggtatgacaggtacagctaaaactgaagaagaagaatttagaaatatttataacatgacagtaactcaaattccgacaaataaacctgtgcaacgtaacgataagtctgatttaatttacattagccaaaaaggtaaatttgatgcagtagtagaagatgttgttgaaaaacacaaggcagggcaaccagtgctattaggtactgttgcagttgagacttctgtatatatttcaaatttacttaaaaaacgtggtatccgtcatgatgtgttaaatgcgaaaaatcatgaacgtgaagctgaaattgttgcaggcgctggacaaaaaggtgccgttactattgccactaacatggctggtcgtggtacagatatcaaattaggtgaaggcgtagaggaattaggcggtttagcagtaataggtacagagcgacatgaatctcgtcgtattgatgaccagttacgtggtcgttctggacgtcaaggtgataaaggggatagtcgcttctatttatcattacaagatgaattaatgattcgttttggttctgaacgtttacagaaaatgatgagccgactaggtttagatgactctacaccaattgaatcaaaaatggtatcaagagctgtagaatcagcacaaaaacgtgtagaaggtaataacttcgacgcgcgtaaacgtatcttagaatacgatgaagtattacgtaaacaacgtgaaattatctataacgaaagaaatagtattattgatgaagaagacagctctcaagttgtagatgcaatgctacgttcaacgttacaacgtagtatcaattactatattaatacagcagatgacgagcctgaatatcaaccattcatcgactacattaatgacatcttcttacaagaaggtgacattacagaggatgatatcaaaggtaaagatgctgaagatattttcgaagtcgtttgggctaagattgaagcagcatatcaaagtcaaaaagatatcttagaagaacaaatgaatgagtttgagcgtatgattttacttcgttctattgatagccattggactgatcatatcgacacaatggatcaattacgtcaaggtattcacttacgttcttatgcacaacaaaatccattacgtgactatcaaaatgaaggtcatgaattatttgatatcatgatgcaaaatattgaagaagatacttgtaaattcattttaaaatctgtagtacaagttgaagataatattgaacgtgaaaaaacaacagagtttggtgaagcgaagcacgtttcagctgaagatggtaaagaaaaagtgaaaccgaaaccaatcgttaaaggcgatcaagttggtcgtaacgatgattgtccatgtggtagtggtaaaaaattcaaaaattgccatggaaaataaatgatataaaataactccttccaattaaacacctatagtttgtgttatgggaggagtctttttattttacaagcgttaaatactttaaaaaatgtgaagaagttgttaaacgttgttatgtacttagttttaaaaaatcggtttaggcatatgtcgatgataaatgtactgatttttaacaataaatgcataaactaattgtcagtgtgcttatatttcttaacattgttatttaacaaaattatgttaaaatttagcattataaaagatgcaaatcaatgacttgaattgaaatataaataggagcgaatgctatggaattatcagaaatcaaacgaaatatagataagtataatcaagatttaacacaaattagggggtctctttgacttagagaacaaagaaactaatattcaagaatatgaagaaatgatggcagaacctaatttttgggataaccaaacgaaagcgcaagatattatagataaaaataatgcgttaaaagcaatagttaatggttataaaacactacaagcagaagtagatgacatggatgctacttgggatttattacaagaagaatttgatgaagaaatgaaagaagacttagagcaagaggtcattaattttaaggctaaagtggatgaatacgaattgcaattattattagatgggcctcacgatgccaataacgcaattctagagttacatcctggtgcaggtggcacggagtctcaagattgggctaatatgctatttagaatgtatcaacgttattgtgagaagaaaggctttaaagttgaaactgttgattatctacctggggatgaagcggggattaaaagtgtaacattgctcatcaaagggcataatgcttatggttatttaaaagctgaaaaaggtgtacaccgactagtacgaatttctccatttgattcatcaggacgtcgtcatacatcatttgcatcatgcgacgttattccagattttaataatgatgaaatagagattgaaatcaatccggatgatattacagttgatacattcagagcttctggtgcaggtggtcagcatattaacaaaactgaatcggcaatacgaattacccaccacccctcaggtatagttgttaataaccaaaatgaacgttctcaaattaaaaaccgtgaagcagctatgaaaatgttaaagtctaaattatatcaattaaaattggaagagcaggcacgtgaaatggctgaaattcgtggcgaacaaaaagaaatcggctggggaagccaaattagatcatatgttttccatccatactcaatggtgaaagatcatcgtacgaacgaagaaacaggtaaggttgatgcagtgatggatggagacattggaccatttatcgaatcatatttaagacagacaatgtcgcacgattaatatatattttaaaaccgaggctctaaaagggcgtcggtttttggtttttttaaaggtagctaaataaattgtaaattagattttggaatatgatttgtttatgaatatttaagtacaattcggtagatagagttagaatatattttttaaaagttgtgtttgttaaaacaacatatgcagtgtgcatttagtaatattacctatggcgattttcaaggtattgaattaattattgaaaacgttctcaattacatggtatgaatacattttacactatgataaaaggttgtattctttttatattgttaaccatttgattacatcgttataacaatagcttttgacaaaatgtattgtgctatagtatttgcatacttaaaatactaacagcaaaggaatgacagcaagatgaaaaaatctcttacagtgacggtttcgtcagtgttagcttttttagctttaaataatgcagcacatgcacaacaacatggcacacaagtaaaaacacctgttcaacataattatgtatcaaatgttcaagcacaaacgcaatcaccgacaacttatacagtagttgctggcgattcattatataagattgctttagagcatcacttaacgttgaatcaattatattcatacaatcctggtgtaacacctttaatttttcctggtgacgtgatttcacttgtgcctcaaaataaagtgaaacaaactaaagcggttaaatcaccagtaagaaaagcaagccaagctaaaaaggtagtaaaacaacctgtacaacaagcatctaaaaaagtagtagttaagcaagcacctaagcaagcagtaactaagacagttaatgtagcatacaaacctgctcaagtacaaaaatcagtaccaactgtacctgttgcacataactacaataaatcagttgctaacagaggaaacttatatgcttatggaaactgcacatattatgctttcgatcgtcgtgcacaattaggtagaagtataggaagtttatggggcaatgcaaataactggaattacgcagcaaaagttgcaggatttaaagtagataaaacaccagaagttggcgctattttccaaacagctgctggtccatatggacatgttggtgttgttgaatctgtaaaccctaatggaacaattactgtttctgaaatgaactatgctggatttaatgttaaatcttcaagaacaattttaaatccaggaaaatataattacatccactaagtaatatatcaagacaagactatcctcttagcctgtttaagtaacaggttgagaggattttttggtatcatttaatcagagttatataaagaagatatttaaatgatatttaattgattgatatgtaaaaagaaagtataatttatgattaattaatggaggaggtaattgaaatgggtgtacatcaatattttaaaagattatcagatatggaaagacttataagattacctggaaaatttaaatattttgaacacaatgttgcagcacactcctttaaagtaactaaaattgcacaatatctagcaacagttgaagaatatcatggacgaaagattaattggaaaagcttatatgaaaaagcattaaatcatgatttcgccgaagtgtttactggtgatataaaaacacctgttaaatatgcgagtagtgaattaaaaaaattattttcgcaagttgaagaagaaatggtagagacctttattgaagaagaaattccattacaatatagagatgtttataagcaacgactgcaagaaggtaaagatgattcattagaaggccaaatactttcagttgctgataaaattgatttgctttatgaaacatttggagaaatacaaaaacgtaatcccgaagaattatttttcgaaatttatgaaatgagtctagaaacaattattcaatttgaccatttagcatctgtacaagattttattaataatatcattccagaaatgttgactgaaaactttatacctagaacagaattaagagaaacaaccatgaacattttaaataaaagaaaagaggaaaatgaatgatatggtattttagcgcagcattctttccatgtgtcttggtagtattatttagtgtaataacaagaagtaaatgggtcggtactattctgacattaattttaattggtgcctcaatctataaagagtatttccataacgagtggattatttttattgatgtagtgtcattattagctggttatttaattatagatcaactcgaatttcataaacatcaagatgaagatcgctaagattaactttaaaataatgtttcaaacaaatttgttgaaacaaaatgatgattaatataatgtgtatttacatactaaaaataacaagataaacgatttgatttaaggcaagcatagttagcacaactatgtttgtttttctttgttcgacatttttacgaacaaacgtttgctttttgtgtgactactttgctaaaatatgtaatgagaaagcaaagagttgagcggaaatataaataatacgttgaaagaggaggcatatgtgacaatggttgaacattatccttttaaaatacattctgattttgagcctcaaggtgaccaaccgcaagcaattaaagaaatcgtggaaggtattaaagcggggaaaagacatcaaactttattaggtgctactggcacagggaaaacatttacgatgagtaatgttattaaagaagttgggaaaccaacgttaattatcgcgcataacaaaacattagcaggacaattatatagtgagtttaaagaattttttcctgaaaacagggtggaatactttgtaagttactatgattattatcaaccagaggcatacgtaccgtctactgacacttttattgaaaaagatgcctcaatcaatgatgaaattgatcaactacgacattctgctacaagtgcattatttgaacgcgatgatgtaattattattgctagtgtaagttgtatatatggtttaggtaatcctgaagaatataaagatttagtagtaagtgttcgagttggtatggaaatggatagaagtgaattacttagaaaacttgtagatgtgcaatatacacgaaatgacatcgatttccaacgaggaacgtttcgagtgcgtggtgatgtagtggaaatattcccagcctctaaagaagaactttgtataagggttgagtttttcggcgatgagattgaccgtatccgagaagttaactacctaacaggtgaagtgttgaaagaaagagaacattttgcgatattcccagcttctcacttcgtaacacgtgaagaaaagttgaaagttgcgattgaacgtattgaaaaagaattggaagaacgattgaaagaattacgagatgagaataaattactagaagcgcaaaggttagaacagcgtaccaactatgatttagaaatgatgcgagagatgggattctgttcaggaattgaaaactattccgtacatttaactttgcgaccactgggttcgacaccatatactttattggattactttggcgatgattggttagtaatgattgatgaatcacatgtgacattaccgcaagttcgaggcatgtataacggagacagagcgcgtaaacaagttttggtggatcatgggtttagattaccgagtgcattagataaccgtccacttaaatttgaagaatttgaagaaaagacaaaacaacttgtgtatgtatctgcaacgcctggaccatacgaaattgaacatacggataagatggttgaacaaattattcgtcctactggtttactggatcctaagattgaggttagacctactgaaaatcaaattgacgatttattaagtgaaattcaaacaagagttgagcgtaatgaacgcgtacttgttacaacgctcactaaaaagatgagtgaagatttaaccacatacatgaaagaagcgggtattaaagttaattatctgcattcagaaatcaagacattagaacgaattgaaataattagagacttacgaatgggtacatatgatgttatcgtaggtattaatttattaagagagggtattgatataccagaagtttctctagttgtcatattagatgcagataaagaagggtttttacgttctaaccgctcattaattcaaacaataggtagagctgcgcgtaacgataaaggtgaagtcattatgtatgccgataaaatgactgattcgatgaagtatgcaattgatgagacacaacgtcgtcgagaaatacagatgaaacataatgaaaaacatggtattacacctaaaacaattaataaaaaaatacatgatttaattagtgctactgttgaaaatgacgaaaataatgacaaagcacaaactgtgatacctaagaagatgacgaaaaaagaacgtcaaaagacaatcgacaatatagaaaaagaaatgaaacaagcagcgaaagatttagatttcgagaaagctacagaattaagagatatgttatttgaattaaaagcagaagggtgacaagtaaatgaaagaaccatccatagtagtaaaaggtgctcgtgcgcataacttgaaagatattgatatcgaactacctaaaaataaattaattgttatgacaggtttatctgggtcaggtaaatcgtcattagcattcgatactatatatgctgaaggacaacgacgttatgttgaatcattaagtgcctatgcgcgtcaatttttaggccaaatggacaaaccagatgttgatacaattgaaggattatcgccagcaatttcaatagatcaaaaaacaacaagtaaaaatccaagatcaactgtagcaacagtaacagaaatatatgattatatacgtttgttatatgcacgtgttggtaaaccttactgtccaaatcacaatatagaaattgaatcgcaaacagtacaacaaatggttgaccgcattatggaattagaggcacgtacaaagattcaattattagcacctgtcatcgctcatcgtaaaggtagtcatgaaaagctaatcgaagatattggtaaaaaaggttatgtacgtttaagaatcgatggcgaaattgttgatgtaaatgatgtacctactttagataagaacaagaatcatacaatagaagttgttgtagaccgattagttgttaaagatggaattgaaacacgactagctgactctatagaaactgccttagagctttcagaaggacaattaacagtcgatgtcattgacggggaagaccttaagttttcagaaagccatgcttgtcctatatgtggattttcaatcggagagttagaaccaagaatgtttagctttaacagtccttttggtgcttgtccgacatgtgatggcttaggccaaaagttaacagtcgatgtagacttggttgttcccgacaaagataagacgctaaacgaaggtgcaatagaaccttggataccgacgagttctgatttttatccaacattgttaaaacgtgtttgtgaagtttataaaatcaatatggataaaccttttaaaaagttaacagaacgtcaacgtgatattttattgtatggttctggtgacaaagaaattgaatttacatttacacaacgtcaaggtggtactagaaaacgaacaatggttttcgagggtgtagttcctaatataagtagacgattccatgaatctccttcagaatatacacgtgaaatgatgagtaaatatatgactgaactaccttgcgaaacttgtcatggaaagcgattgagtcgtgaagcgttatctgtttatgtaggtggtttaaatattggtgaagtagtcgaatattcaatcagtcaagcgctgaactattataaaaacattgatttgtcagaacaagatcaagcgattgcaaatcaaatattgaaagaaattatttcccgactcacttttttaaataatgtgggacttgaatatttaacgttaaacagagcttcaggtacactttcaggtggtgaagcacaacgtattcgattagcaacgcaaattgggtcgcgtttgactggtgtcttatatgtattagatgagccatcaattggactgcatcaaagagataatgatcgattaattaatacacttaaagaaatgagagatttaggaaatactttaattgtagttgaacacgatgatgatacaatgcgtgcggctgattacttagtggatataggtcctggtgctggtgaacatggagggcagattgtgtctagtggtactcctcaaaaggtaatgaaagataaaaaatcattaacaggacaatacttgagtggtaagaaacgtattgaagtacctgaatatcgcagaccggcttcagatcgtaaaatttctatacgtggagctagaagcaacaatcttaaaggggttgatgtggacataccactatcaatcatgacggttgttacaggtgtatcaggttctggtaaaagctcattagtaaatgaagtattatacaaatcattagctcaaaaaattaataaatctaaagtaaagccaggattgtacgataagattgaaggtattgatcaacttgataaaattattgatattgatcaatcaccaataggtagaacgccacgctctaatccagcaacatatactggtgtgtttgatgatatacgtgatgtgtttgcgcaaacaaatgaagctaaaattcgaggatatcaaaaagggcgttttagttttaatgtaaaaggtggacgctgtgaagcttgtaaaggtgacggtattattaaaattgaaatgcattttttacctgatgtttatgttccttgtgaagtgtgtgatggtaaacgatataatcgtgagacactagaggttacttacaaaggtaaaaatattgctgacattttagaaatgactgttgaagaagcaacacaattttttgaaaatattcctaagattaagcgcaagttacaaacactagttgatgttggtcttggatacgtcacattaggtcaacaagctacaacgttatcaggtggtgaggctcaacgtgtgaaacttgcatctgaacttcataaacgttcaactggtaaatctatttatatcctagatgaaccgacaacagggttacatgttgacgatattagtagattattaaaagtattaaaccgattagttgaaaatggtgatactgttgtaattattgaacataacctagatgttatcaaaacagcagactatattatagacttaggtcctgaaggtggtagtggcggtggtactattgttgcgactggcacacccgaagatattgctcagacaaagtcatcatatacaggaaagtatttaaaagaagtacttgaacgagataaacaaaatactgaagataaataagattaaaagaagtgaaggatgttataaatttatccttcgcttctttttattaatttagtaatgaatagtagaaagaaaagatgcgtaaaaagaattatgttaagatagggtcaatctagagtagttaaacataaatcgaactgggagtgggacagaaatgataaagaatcactaatgatttattatgtagtggttctttgtcattagccacagctattgtgtacttaaaaataggaatgcatgagtgcaactcatgcataagaaatactaatttctaaagaaaaagtatttctttatgttggggccccgccaacttgcattgtttgtagaatttcttttcgaaattctttatgttggggccccgccaacttgcattgtttgtagaatttcttttcgaaattctttatgttggggccccgccaactaattccaatatatcattgtagagcttaggtcattgatttttggctcggacttttatggcgatatgaaccatgtaaattaagcaagcaataaattaatgattgatattgacttgtaaaataataacaataatgaacaattaatatttattttagcttttcaatgtagattggtgttatatttttgatatgataagaagagatgtaagagtagggataaatacaattgaggtgaacccatgttaacgacagaaaaactagttgaaacattaaagttagatttaatcgctggtgaagaaggactatcgaagccaattaaaaatgctgatatatcaagaccgggcttagagatggcaggttatttttcacattatgcgtcagatagaatacaactattaggaacaacggaactatcgttttacaatttattaccagataaggatcgcgcaggtcgtatgcgtaaactatgcagaccagaaacgcctgcaattattgtgacacgtggattgcagccaccagaagaattagttgaagctgcaaaagaattaaataccccacttatagttgctaaagatgcgactacaagtttaatgagtcgcttaacaacgtttttagagcatgcacttgcaaagacgacatctttacatggtgttttagtagatgtttacggtgttggtgtactaattaccggtgattcaggaataggtaaaagtgagactgcgttggaattagttaaacgtgggcatagattagtagcagatgataatgtagaaatacgtcaaattaataaagatgaactaatagggaaaccaccaaagttaatagaacatctattagaaatacgtggactaggtattatcaatgttatgactttatttggcgcgggttcaatattaactgaaaaacgaattagattaaatattaatttggaaaactggaacaagcaaaagttatatgaccgcgtaggtcttaatgaagagacgctaagtattttagatactgaaatcactaaaaaaacaatacctgtaagacctggtagaaatgttgcggtaattattgaggtcgctgcaatgaactatcgattaaatatcatgggcattaacacggccgaagaatttagtgaaagattaaatgaagaaattatcaagaacagtcataagagtgaggagtaggttgaatgggtattgtatttaactatatagatcctgtggcatttaacttaggaccactgagtgtacgatggtatggaattatcattgctgtcggaatattacttggttactttgttgcacaacgtgcactagttaaagcaggattacataaagatactttagtagatattattttttatagtgcactatttggatttatcgcggcacgaatctattttgtgattttccaatggccatattacgcggaaaatccaagtgaaattattaaaatatggcatggtggaatagcaatacatggtggtttaataggtggctttattgctggtgttattgtatgtaaagtgaaaaatttaaacccatttcaaattggtgatatcgttgcgccaagtataattttagcgcaaggaattggacgctggggtaactttatgaatcacgaggcacatggtggatcggtgtcacgcgcttttttagaacaattacatttgcctaattttataatagaaaatatgtatattaacggccaatattatcatccaacattcttatatgaatccatttgggatgtcgctggatttattatcttagttaatattcgtaaacatttaaaattaggagaaacattctttttatatttaacttggtattcaattggtcgattctttatagaaggattacgtacagatagcttaatgctcacaagtaatattagagttgcacaattagtatcaattcttttaattttaataagtataagtttaattgtatatagaaggattaagtataatccaccgttgtatagcaaagttggggcgcttccatggccaacaaaaaaagtgaagtagtgatagtttgaggaaatttttatcaaaaacacatcatcatacaaaccctttatggcgtgtataccgtcttgttaaattttcgaaagtttttaagaatgtaattatcattgaattttcgaaatttattccaagtatggtactgaaaagacatatatataaacaacttttaaatattaatatcggtaatcaatcgtcgatagcttataaagtaatgttagatattttttacccagaactgattacgattggtagtaacagtgttattggttacaatgtaacaattttgacgcatgaagcattagttgatgaatttcgttatggaccagtgacgataggatctaacactttgattggtgcaaatgctaccattttacccggtataacgattggtgacaatgtaaaagttgcagctggtacggttgtttcaaaagatataccggataatggatttgcatatggcaaccctatgtatataaaaatgattaggaggtgacaattttatggcgcaaaagaataataatgtaattccaatgacttttgatgatgcattttatcgtaaaatggctaaacagaagtttaaacaaagagaatataaacgagctgctgaatactttgaaaaagtgttagaattgtcacctgatgatctggaaattcaaattgattatgcacaatgtctagtgcaacttggtattgctaaaaaagcagaacatttattttatgacaatattatttataataggcatctagaagatagcttttatgaattgagtcagctcaacattgaagttaacgaaccaaacaaggcattcttgtttggtattaattatgttattgttagcgacgaccaagattatagagatgaattagatcaaatgtttgatgtgaaatatcaaagtgaagaacaaattgaacttgaagctcaattgtttgtagttcaaatactattccaatatcttttttctcaaggtcgattaaaagatgcaaagaattatgtcttacatcaaccacaagaagttcaagatcatcgtgtagtacgtaatttattggcaatgtgttatttatatctcggtgaatatgatacggctaaagcattgtacgaagcactattacaagaggatagtacagatatatatgcattatgccattatactttgctactttataacactaaggaaaatgaacaatatcaaaaatatttaaaaatattaaacaaagttgtacctatgaatgacgatgaaagttttaaattaggtattgtattaagttatttaaagcagtatcgtgcatcacaacaattgttgtaccctttatataaaaaaagggaaatttttatcaattcaaatgtacaatgctttagcatataattattattatttaggtgaagaagacgaaagtcattactactgggataaattgaagcaaatttctaaagtggaaattggacatgcgccttgggtaattgaaaatagcaaagaagtttttgaccaacatattttgccattacttcaaagtgatgacagtcattatcgtttatatggtatttttttattggatcaattaaatggtaaagaaattgtgatgacggaaagtatttggcaggttttggaaaatctaaataattatgagaaattgtatttaacgtatttagttcaaggtttaacgctcaataaattagacttcattcatcgcggcttattaacgctttaccataatgaattatttgtaagtgaaaatgatgtaatggttgcatggattaatcaaggtgaactcataattgctgaaaaagtagatttaactgatgttgagccatatatcggtgcgtttatttatttgtattttaaaaatcaacctcgaaacgttacaaagaagcaaattacaacatggttaggcataacacaatataaactgaacaaaatgattgaatttctcttgagcatatagatttatgaaaagttagatttattatataatgcgcataatgattaataatgaggaggcgttaataaaatgactgaaatagattttgatatagcaattatcggtgcaggtccagctggtatgactgctgcagtatacgcatcacgtgctaatttaaaaacagttatgattgaaagaggtattccaggcggtcaaatggctaatacagaagaagtagagaacttccctggtttcgaaatgattacaggtccagatttatctacaaaaatgtttgaacacgctaaaaagtttggtgcagtttatcaatatggagatattaaatctgtagaagataaaggcgaatataaagtgattaactttggtaataaagaattaacagcgaaagcggttattattgctacaggtgcagaatacaagaaaattggtgttccgggtgaacaagaacttggtggacgcggtgtaagttattgtgcagtatgtgatggtgcattctttaaaaataaacgcctattcgttatcggtggtggtgattcagcagtagaagagggaacattcttaactaaatttgctgacaaagtaacaatcgttcaccgtcgtgatgagttacgtgcacagcgtattttacaagatagagcattcaaaaatgataaaatcgactttatttggagtcatactttgaaatcaattaatgaaaaagacggcaaagtgggttctgtgacattaacgtctacaaaagatggttcagaagaaacacacgaggctgatggtgtattcatctatattggtatgaaaccattaacagcgccatttaaagacttaggtattacaaatgatgttggttatattgtaacaaaagatgatatgacaacatcagtaccaggtatttttgcagcaggagatgttcgcgacaaaggtttacgccaaattgtcactgctactggcgatggtagtattgcagcgcaaagtgcagcggaatatattgaacatttaaacgatcaagcttaattcgaagtcgaattaagatgttgagctgtaaattatttggatatttattttaatagtgtcatcacagcgttaaaataatgtcttacttttaaattaaagcaaattatatagaaaactagaacttagtacgtatcatttgtgcgtttcaatgagttctagtttttttatatgttatattaaacttataactttatgggagtgggacagaaatgataaagagccactaatgatttattatgtagtggttcttaaacattagccacagctaatgtgtacttaaaaataggaatacatgagtaaaactcatgcataagaaatactaatttctatagaaaaagtattactttatcgttgtcccaccccaacttgcacattattgtaagctgactttccgccagcttctgtgttggggccccgccaacttgcacattattgtaagctgacttttcgtcagcttctgtgttggggccccgccaacttgcacattattgtaagctgacttttcgtcagcttctgtgttggggccccgccaacttgcattgtctgtagaaattgggaatccaatttctctatgttggggcccacaccccaactcgcattgcctgtagaatttcttttcgaaattctctgtgttggggcccacaccccaactcgcattgcctgtagaatttcttttcgaaattctctgtgttggggcccacaccccaactcgcattgcctgtagaatttcttttcgaaattctctgtgttggggcccctgactagagttgaaaaaagcttgttgcaagcgcattttcattcagtcaactactagcaatataatattatagaccctaggacattgatttatgtcccaagctccttttaaatgatgtatatttttagaaatttaatctagacatagttggaaataaatataaaacatcgttgcttaattttgtcatagaacatttaaattaacatcatgaaattcgttttggcggtgaaaaaataatggataataatgaaaaagaaaaaagtaaaagtgaactattagttgtaacaggtttatctggcgcaggtaaatctttggttattcaatgtttagaagacatgggatatttttgtgtagataatctaccaccagtgttattgcctaaatttgtagagttgatggaacaaggaaatccatccttaagaaaagtggcaattgcaattgatttaagaggtaaggaactatttaattcattagttgcagtagtggataaagtcaaaagtgaaagtgacgtcatcattgatgttatgtttttagaagcaagtactgaaaaattaatttcaagatataaggaaacgcgtcgtgcacatcctttgatggaacaaggtaaaagatcgttaatcaatgcaattaatgatgagcgagagcatttgtctcaaattagaagtatagctaattttgttatagatactacaaagttatcacctaaagaattaaaagaacgcattcgtcgatactatgaagatgaagagtttgaaacttttacaattaatgtcacaagtttcggttttaaacatgggattcagatggatgcagatttagtatttgatgtacgatttttaccaaatccatattatgtagtagatttaagacctttaacaggattagataaagacgtttataattatgttatgaaatggaaagagacggagattttctttgaaaaattaactgatttgttagattttatgatacccgggtataaaaaagaagggaaatctcaattagtaattgccatcggttgtacgggtggacaacatcgatctgtagcattagcagaacgactaggtaattatctaaatgaagtatttgaatataatgtttatgtgcatcatagggacgcacatattgaaagtggcgagaaaaaatgagacaaataaaagttgtacttatcggtggtggcactggcttatcagttatggctaggggattaagagaattcccaattgatattacggcgattgtaacagttgctgataatggtgggagtacagggaaaatcagagatgaaatggatataccagcaccaggagacatcagaaatgtgattgcagctttaagtgattctgagtcagttttaagccaactttttcagtatcgctttgaagaaaatcaaattagcggtcactcattaggtaatttattaatcgcaggtatgactaatattacgaatgatttcggacatgccattaaagcattaagtaaaattttaaatattaaaggtagagtcattccatctacaaatacaagtgtgcaattaaatgctgttatggaagatggagaaattgtttttggagaaacaaatattcctaaaaaacataaaaaaattgatcgtgtgtttttagaacctaacgatgtgcaaccaatggaagaagcaatcgatgctttaagggaagcagatttaatcgttcttggaccagggtcattatatacgagcgttatttctaacttatgtgtgaatggtatttcagatgcgttaattcattctgatgcgcctaagctatatgtttctaatgtgatgacgcaacctggggaaacagatggttatagcgtgaaagatcatatcgatgcgattcatagacaagctggacaaccgtttattgattatgtcatttgtagtacacaaactttcaatgctcaagttttgaaaaaatatgaagaaaaacattctaaaccagttgaagttaataaggctgaacttgaaaaagaaagcataaatgtaaaaacatcttcaaatttagttgaaatttctgaaaatcatttagtaagacataatactaaagtgttatcgacaatgatttatgacatagctttagaattaattagtactattcctttcgtaccaagtgataaacgtaaataatatagaacgtaatcatattatgatatgataatagagctgtgaaaaaaatgaaaatagacagtggttctaaggtgaatcatgttttaaataagaaaggaatgactgtacgatgagctttgcatcagaaatgaaaaatgaattaactagaatagacgtcgatgaaatgaatgcaaaagcagagctcagtgcactgattcgaatgaatggtgcacttagtctttcaaatcaacaatttgttataaatgttcaaacggaaaatgcaacaacggcaagacgtatttattcgttgattaaacgtgtctttaatgtggaagttgaaatattagtccgtaaaaaaatgaaacttaaaaaaaataatatttatatttgtcgtacaaagatgaaagcgaaagaaattcttgatgaattaggaattttaaaagacggcatttttacgcatgaaattgatcattcaatgattcaagatgacgaaatgagacgcagttacttgagaggagcttttctggcaggtggctcagtgaataaccctgaaacatcttcgtaccatttggaaattttttctcaaaatgagagtcatgcagaaggcttaacgaaactaatgaatagttatgagttgaatgccaaacatttagagcgaaaaaaaggaagtattacgtatttaaaagaagcggaaaagatttcggattttcttagtttgataggtggctatcaagcgttattaaaatttgaagacgtacgtattgtaagagatatgcgtaattctgttaaccgactcgttaattgtgaaacggccaatctaaataaaacagttagtgctgcgatgaaacaagttgagagcattaaattgattgataaagaaattggtattgaaaatttaccagacaggttgagagagattgctagaattcgagtagaacatcaagaaatttcgttgaaagagcttggagaaatggtatcaactggtccaatttcaaaatcaggtgtaaatcaccgattaagaaaactgaatgatttagccgataagattagaaatggtgaacaaatagaattataagtaagaaggtgtttttggtagtgaattatcaaaaacacttttttatgattaaaaagtgtttaatgaataatagtcgactaactattaaattgagctggaaagtttaatgaaggaaattcaataaccaagtgatgcctaattttctcattaaatagcatcatatgtatcaatttggtcataagaaaatatgaatgtgataattaattgagtccctgaaagtccctgatcatagacaaaaacaaaatcagcataaataagaatcccgacattgcgggattctctgtattgaaaagtattgtattttattaaaacagcctccttgaagggaattgaacccctatcttaagaaccggaatcttacgtgttatccattacaccacaaggagcaaatatgtaatcatatctctgtactatgagaagtaaaataagtacaatctaaaatagatattatcagtttacaaaggaaagagaaaagcgtcaaacaatgtaactatttaaagtcaaagtgtttgaccaaatttgacttaatatgtaaaataatgagtaacagttattacaaggaggaaatatagatgaatttaattcctacagttattgaaacaacaaaccgcggtgaacgtgcatatgatatatactcacgtttattaaaagaccgtattattatgttaggttcacaaattgatgacaacgtagcaaattcaatcgtatcacagttattattcttacaagcgcaagactcagagaaagatatttatttatacattaattcaccaggtggaagtgtaacagctggttttgcgatttatgatacaattcaacacattaaacctgatgttcaaacaatttgtatcggtatggctgcatcaatgggatcattcttattagcagctggtgcaaaaggtaaacgtttcgcgttaccaaatgcagaagtaatgattcaccaaccattaggtggtgctcaaggacaagcaactgaaatcgaaattgctgcaaatcacattttaaaaacacgtgaaaaattaaaccgcattttatcagagcgtactggtcaaagtattgaaaaaatacaaaaagacacagatcgtgataacttcttaactgcagaagaagctaaagaatatggcttaattgatgaagtgatggtacctgaaacaaaataattcaaagtaaagagtagactaagctgtctgctctttttgtatgagtaaaccaaggtgtcaataatttgtttactatactttgagcggaaatatgattgaatgaagctagttgaaccgtaactatatgaaatgttcccttcaaagtagacattgaaaggaacatttcaatcctttgtttgtaagtcgctctagacattacatttagtacatatgttgtttctaatgctcattaatggtattgattattctttaattaaatcttcaagtgccatttttaaattactatatttaaattggaatcccaatgcttgaattttattaggtaatactttttgagtatccaatactactgttgacatttgaccaagtatgagacgcattgcaagacttggtgcccaagtttcatgaggcttatgcatagctcttgctaaagtgtagccaaataaattttgacgttcaggtataggtgcagttaaattaaacggaccactagctgactcgttatttattaaaaataaaatagcttgaattaaatcattgatatgaatccatgaataccattgttgaccagaacctaatttaccaccaatgtaatattcgtatggtagtttcattgtttgtaacgcaccgccttcattcgataaaattataccgaaacgaccgatgacaactcgtgtacctaattgttcaaattgttgtgcgaaacgttcccattgatacacaatatctgataagaaatcaaaaggtaaagttttataaacttctgtgtaactcataaataaatcaggaggatagtaaccagtggcactagcattaaataaagctttaggtgctttattacgtgatttaaacaattcatataaagcttgcgtagattgaattctacttagcattagcgtttgtttatattccggtgtccatcgtttattcaatgtagcacctgctaagttgatgaccacatcgatattttgaggaactttgtgttcccacccagatttagcccagttgacatatgaaattttcttatcatttgaaatttggtcgtgtcgcgttaatatcgtgatatgtgaatctgattttttaatttcattaactaattgagatccaaccataccagtcccaccagtaattaagtattgtttcattatcattcaccccatgtaattttgtatttagttactatttaataatcattattgttgttcaaaggttatacattatttagacaataatatgtcaataactttttttgaattgtattttaataaaaatgatataagttataataaaggtgtaccttcgataacgaataaacatctcttaaaagtatgtgtaaaacgctgcatgatacaaacgaaggtaaaaatttgactccctttagtagtggacccgtacgttaatcgtgcgggtcgtttttatttatttcttattcccattatacatcaatttaaagcattaattttttaaacaaatttaagaatacatagtaatataacaatctaaacataaaaacttttaacacaacacttaaaccaatgctttaattttcaatacgtagctataatttgttgtaaaatcaaaaaggttaaaatgttaattttcaaaaaaaggctcaaaatatgtttgatttagttattaaatgttaagatatataagactactatttctttgtaaaaatgaatccgatttacgagtgagtaatagtgaaggcagttttaagttgaagaaggcaaaaagagtaaatgtttattaatatttgtagaaactaggtaagcaaattagttgtgaaaatgttaatggttgcgtgataatttctatatttaaattagtttgaagtgagggagagtatgtcgaatcaaaattacgactacaataaaaatgaagatggaagtaagaagaaaatgagtacaacagcgaaagtagttagcattgcgacggtattgctattactcggaggattagtatttgcaatttttgcatatgtagatcattcgaataaagctaaagaacgtatgttgaacgaacaaaagcaggaacaaaaagaaaagcgtcaaaaagaaaatgcagaaaaagagagaaagaaaaagcaacaagaggaaaaagagcagaatgagctagattcacaagcaaaccaatatcagcaattgccacagcagaatcaatatcaatatgtgccacctcagcaacaagcacctacaaagcaacgtcctgctaaagaagagaatgatgataaagcatcaaaggatgagtcgaaagataaggatgacaaagcatctcaagataaatcagatgataatcagaagaaaactgatgataataaacaaccagctcagcctaaaccacagccgcaacaaccaacaccaaagccaaataataatcaacaaaacaatcaatcaaatcagcaagcaaaaccacaagcaccacaacaaaatagccaatcaacaacaaataaacaaaataatgctaatgataagtagtatttagtcaaacaaaaatgaaccagtatgacagacaacacaattaattaggttgtctcgaatattggttcttatttttataattgttaattaggggagagatgatacttaaatagttagttgtttattttacggatagtgaaatttattttgagtgaggtgggacagaaatgatatttttgcaaaatttatttcgtcgtcccaccccaactcgcattgcctgtagaatttcatttcgaaattctctatgttggggcccctgactttaattgaaaaaagcttgttacaagtgcattttcgttcggttaactactactaatgtgactttttggattctagagcattgatttatgtcctagtctcaaataataagcaaatgattatcgagtcagtataagggtatacatttgactacagcgaataaaataaaacgttttgttgaataacaaatcgaaaatatattgcaagcgctttatcaaattatttagaaaatttaagttttatgcttgcaatttttgaaatagaatagtactattgcaagtgtaaagaggttaatttttgtcccacgcgggacttaaaaaggcaaccactggttgtgacatatccttatttacatttataaatataaggaggaggtagtagtgaaagacttattgcaagcacagcaaaagcttataccggatctcatagataaaatgtataaacgtttttctattcttactactatctcaaaaaatcagcctgtcggacgtcgaagtttaagcgaacatatggatatgactgaacgtgtactgcgttctgaaacagatatgcttaagaaacaagatttgataaaagttaagcctaccggaatggaaattacagctgaaggtgagcaactgatttcgcaattgaaaggttactttgatatctatgcagatgataatcgtctgtcagaaggtattaagaataaatttcaaattaaggaagttcatgttgttcctggtgatgctgataatagtcaatctgttaaaacagaattaggtagacaagcaggtcaattacttgaaggcatattacaagaagacgcgatagttgctgtaactggcggatccacgatggcatgtgttagtgaagcaattcatttattaccatataatgtattcttcgtaccagccagaggtggactaggcgaaaatgttgtctttcaggcaaacacaattgcagccagtatggcacaacaagctggcggttattatacgacgatgtatgtacctgataatgtcagtgaaacaacatataatacattgttgttagagccatcagtcataaacactttagacaaaattaaacaagcaaacgttatattacacggcattggtgatgcgctgaagatggcgcatcgacgtcaatcacctgaaaaggtcattgaacaacttcaacatcatcaagctgtcggagaggcatttggttattattttgatacacaaggtcaaattgtccataaggttaaaacaattggacttcaattagaagaccttgaatcaaaagactttatttttgcagttgcaggaggcaaatcgaaaggtgaagcaattaaagcatacttgacgattgcacccaagaatacagtgttaatcactgatgaagccgcagcaaagataatacttgaataagagataaaaagtttaatactttttaaatatcattttaaaggaggccattataatggcagtaaaagtagcaattaatggttttggtagaattggtcgtttagcattcagaagaattcaagaagtagaaggtcttgaagttgtagcagtaaacgacttaacagatgacgacatgttagcgcatttattaaaatatgacactatgcaaggtcgtttcacaggtgaagtagaggtagttgatggtggtttccgcgtaaatggtaaagaagttaaatcattcagtgaaccagatgcaagcaaattaccttggaaagacttaaatatcgatgtagtattagaatgtactggtttctacactgataaagataaagcacaagctcatattgaagcaggcgctaaaaaagtattaatctcagcaccagctactggtgacttaaaaacaatcgtattcaacactaaccaccaagagttagacggttctgaaacagttgtttcaggtgcttcatgtactacaaactcattagcaccagttgctaaagttttaaacgatgactttggtttagttgaaggtttaatgactacaattcacgcttacacaggtgatcaaaatacacaagacgcacctcacagaaaaggtgacaaacgtcgtgctcgtgcagcggcagaaaacatcatccctaactcaacaggtgctgctaaagctatcggtaaagttattcctgaaatcgatggtaaattagatggtggtgcacaacgtgttcctgtagctacaggttcattaactgaattaacagtagtattagaaaaacaagacgtaacagttgaacaagttaacgaagctatgaaaaatgcttcaaacgaatcattcggttacactgaagacgaaatcgtttcttcagacgttgtaggtatgacttacggttcattattcgacgctacacaaactcgtgtaatgtcagttggcgaccgtcaattagttaaagttgcagcttggtatgataacgaaatgtcatatactgcacaattagttcgtacattagcatacttagctgaactttctaaataattttagtatagtttttattcaaatacgctagtgctcagaactatttagcattaattaaagcttatgagtaagcggggagcacaaacgcttctccgcttatttttatataaaatttcctaattacaaggaggaaacaccatggctaaaaaaattgtttctgatttagatcttaaaggtaaaacagtcctagtacgtgctgattttaacgtacctttaaaagacggtgaaattactaatgacaaccgtatcgttcaagctttacctacaattcaatacatcatcgaacaaggtggtaaaatcgtactattttcacatttaggtaaagtgaaagaagaaagtgataaagcaaaattaactttacgtccagttgctgaagacttatctaagaaattagataaagaagttgttttcgtaccagaaacacgcggcgaaaaacttgaagctgctattaaagaccttaaagaaggcgacgtattattagttgaaaatacacgttatgaagatttagacggtaaaaaagaatctaaaaatgatccagaattaggtaaatactgggcatctttaggtgatgtgtttgtaaatgatgcttttggtactgcgcatcgtgagcatgcatctaatgttggtatttctacacatttagaaactgcagctggattcttaatggataaagaaattaagtttattggcggcgtagttaacgatccacataaaccagttgttgctattttaggtggagcaaaagtatctgacaaaattaatgtcatcaaaaacttagttaacatagctgataaaattatcatcggcggaggtatggcttatactttcttaaaagcgcaaggtaaagaaattggtatttcattattagaagaagataaaatcgacttcgcaaaagatttattagaaaaacatggtgataaaattgtattaccagtagacactaaagttgctaaagaattttctaatgatgccaaaatcactgtagtaccatctgattcaattccagcagaccaagaaggtatggatattggaccaaacactgtaaaattatttgcagatgaattagaaggtgcgcacactgttgtatggaatggacctatgggtgtattcgagttcagtaactttgcacaaggtacaattggtgtatgtaaagcaattgcaaaccttaaagatgcaattacgattatcggtggcggtgattcagctgcagcagcaatctctttaggttttgaaaatgacttcactcatatttcaactggtggcggcgcgtcattagagtacctagaaggtaaagaattgcctggtatcaaagcaatcaataataaataataaagtgatagtttaaagtgatgtggcatgtttgtttaacattgttacgggaaaacagtcacaagatgacatcgtgtttcatcacttttcaaaaatatttacaaaacaaggagtgtctttaatgagaacaccaattatagctggtaactggaaaatgaacaaaacagtacaagaagcaaaagacttcgtcaatacattaccaacactaccagattcaaaagaagtagaatcagtaatttgtgcaccagcaattcaattagatgcattaactactgcagttaaagaaggaaaagcacaaggtttagaaatcggtgctcaaaatacgtatttcgaagataatggtgcgttcacaggtgaaacgtctccagttgcattagcagatttaggcgttaaatacgttgttatcggtcattctgaacgtcgtgaattattccacgaaacagatgaagaaattaacaaaaaagcgcacgctattttcaaacatggaatgactccaattatatgtgttggtgaaacagacgaagagcgtgaaagtggtaaagctaacgatgttgtaggtgagcaagttaagaaagctgttgcaggtttatctgaagatcaacttaaatcagttgtaattgcttatgaaccaatctgggcaatcggaactggtaaatcatcaacatctgaagatgcaaatgaaatgtgtgcatttgtacgtcaaactattgctgacttatcaagcaaagaagtatcagaagcaactcgtattcaatatggtggtagtgttaaacctaacaacattaaagaatacatggcacaaactgatattgatggggcattagtaggtggcgcatcacttaaagttgaagatttcgtacaattgttagaaggtgcaaaataatcatggctaagaaaccaactgcgttaattattttagatggttttgcgaaccgcgaaagcgaacatggtaatgcggtaaaattagcaaacaaacctaattttgatcgttattacaacaaatatccaacgactcaaatcgaagcgagtggcttagatgttggactacctgaaggacaaatgggtaactcagaagttggtcatatgaatatcggtgcaggacgtatcgtttatcaaagtttaactcgaatcaataaatcaattgaagacggtgatttctttgaaaatgatgttttaaataatgcaattgcacacgtgaattcacatgattcagcgttacacatctttggtttattgtctgacggtggtgtacacagtcattacaaacatttatttgctttgttagaacttgctaaaaaacaaggtgttgaaaaagtttacgtacacgcatttttagatggccgtgacgtagatcaaaaatccgctttgaaatacatcgaagagactgaagctaaattcaatgaattaggcattggtcaatttgcatctgtgtctggtcgttattatgcaatggatcgtgacaaacgttgggaacgtgaagaaaaagcttacaatgctattcgtaattttgatgccccaacttatgcaactgccaaagaaggtgtagaagcaagctataatgagggcttaactgacgaattcgtagtaccattcatcgttgagaatcaaaatgacggtgttaatgatggagatgcagtgatcttctataatttccgacctgatagagcagcgcaattatcggaaatttttgcgaacagagcattcgaaggctttaaagttgaacaagttaaagacttattctatgcaacattcactaagtataatgacaatatcgatgcggctatcgtcttcgaaaaagttgatttaaataatacaattggtgaaattgcacaaaataacaatttaactcaattacgtattgcagaaactgaaaaataccctcacgttacttactttatgagtggtggacgtaacgaggaatttaaaggtgaacgccgtcgtttaattgattcacctaaagttgcaacgtatgacttgaaaccagaaatgagtgcttatgaagttaaagatgcattattagaagagttaaataaaggtgacttggacttaattattttaaactttgctaaccctgatatggttggacatagtggtatgcttgagccgacaatcaaagcaatcgaagcggttgatgaatgtttaggagaagtggttgataagattttagacatggacggttatgcaattattactgctgaccatggtaactctgatcaagtattgacggatgatgatcaaccaatgactacgcatacaacgaacccagtaccagtgattgtaacaaaagaaggcgttacacttagagaaactggtcgcttaggtgacttagcacctacattattagatttattaaatgtagaacaacctgaagatatgacaggtgaatctttaattaaacactaatattgtaaaagatgttaagtaaacgcttaatgacacttattttttgaaaataatagtaatatcattttgttaaatgaaagaataaagctataataattatagaataactatttaaaggagattataaacatgccaattattacagatgtttacgctcgcgaagtcttagactctcgtggtaacccaactgttgaagtagaagtattaactgaaagtggcgcatttggtcgtgcattagtaccatcaggtgcttcaactggtgaacacgaagctgttgaattacgtgatggagacaaatcacgttatttaggtaaaggtgttactaaagcagttgaaaacgttaatgaaatcatcgcaccagaaattattgaaggtgaattttcagtattagatcaagtatctattgataaaatgatgatcgcattagacggtactccaaacaaaggtaaattaggtgcaaatgctattttaggtgtatctatcgcagtagcacgtgcagcagctgacttattaggtcaaccactttacaaatatttaggtggatttaatggtaagcagttaccagtaccaatgatgaacatcgttaatggtggttctcactcagatgctccaattgcattccaagaattcatgattttacctgtaggtgctacaacgttcaaagaatcattacgttggggtactgaaattttccacaacttaaaatcaattttaagcaaacgtggtttagaaactgcagtaggtgacgaaggtggtttcgctcctaaatttgaaggtactgaagatgctgttgaaacaattatccaagcaatcgaagcagctggttacaaaccaggtgaagaagtattcttaggatttgactgtgcatcatcagaattctatgaaaatggtgtatatgactacagtaagttcgaaggcgaacacggtgcaaaacgtacagctgcagaacaagttgactacttagaacaattagtagacaaatatcctatcattacaattgaagacggtatggacgaaaacgactgggatggttggaaacaacttacagaacgtatcggtgaccgtgtacaattagtaggtgacgatttattcgtaacaaacactgaaattttagcaaaaggtattgaaaacggaattggtaactcaatcttaattaaagttaaccaaatcggtacattaactgaaacatttgatgcaatcgaaatggctcaaaaagctggttacacagcagtagtttctcaccgttcaggtgaaacagaagatacaacaattgctgatattgctgttgctacaaacgctggtcaaattaaaactggttcattatcacgtactgaccgtattgctaaatacaatcaattattacgtatcgaagatgaattatttgaaactgctaaatatgacggtatcaaatcattctataacttagataaataattttctttataatcaaatgctgacataattttagttgaggattattatgacggtataaattaaataaagattttgagttcacgcttaaataagttcacgcttaaatttatagcctgccacagagttgagactgtggtaggttttttattttgaagtattaatcataacagactaataatcatgaggtaactaataacacatatttaacttgtattcttaaactggtataataaatttatgttgaaatgaatattgtatgacagggtattcacttttattaaaaggtaaaattaaataaaggttttatagaacgtatttaaatatatgaggagtaaacaaatggctgatagaacgaataaagaaattaaaacaggacgctttattgcaactgcatcaatcgtattctcaatattattgattattcattactttgtttcgttggataatgcgactgccaaagcattacttaatttaacgaatcaaaacacttcagataaagcgattgattacattttaaacagctttagattcactggtattatgtatattttggcttatctagcaggcttcatcactttttggaatcgacatacttatgtgtggtggtttatgtttgcagtttatgtatcaaatagtttgtttacgttgattaatttatcaatcacaattcaagcaataaaagctgcacacggtgcgtacttaacattgccaattttaattgttattataggttcggttgcattagcgatttatatgcttgttgtttctatcaaacgtaaaagtacatttaatcgctagaaaattgattttaacaataaaaatatgatatactacttgtcgtatataaggaacggaggacaatttatgcatacatttttaatcgtattattaatcattgattgtattgcattaataactgttgtactactccaagaaggtaaaagcagtggactttcaggtgccatcagtggtggtgctgagcagttattcggtaaacaaaaacaacgtggcgtcgatttattcttaaatagattaacaattattttatcaatattattttttgtacttatgatttgcataagttatcttggtatgtaaggtccggcgatgtaaatgtcgggcttttttatttataattaagaatgtaatagtttaacaataagctatgtaaaatatatagcctagttaagtatgcaaagggagcgttagatttatgcagataaaattaccaaaacctttcttttttgaggaaggtaaacgtgccgtgttattactacatggttttacaggcaattcgtctgatgttcgtcaattaggtcgatttttacaaaagaaaggttatacatcatatgcaccgcaatatgaaggccacgcggcaccaccagatgaaatactgaaatctagtcctttcgtttggtttaaagatgcgttagatggttatgattatcttgttgaacaaggttatgatgaaattgttgttgctggtctatcattaggtggggattttgctttaaaattaagcttaaatagagatgtaaagggtattgtaacgatgtgtgctcctatgggtggcaaaactgaaggtgccatttatgaaggctttttagaatatgcacgcaattttaaaaagtatgaaggtaaagatcaagagactattgataatgaaatggatcattttaaaccaactgaaactttaaaagaactaagtgaagcattagatacgattaaagagcaagttgatgaagtgttggatcctattttagtgattcaagcagaaaacgacaatatgattgatccacaatccgcaaattatatatatgaccatgtagattctgatgacaaaaatatcaagtggtacagtgaatctggacatgttattacgattgataaagagaaagaacaagtatttgaagatatttatcaatttttagagtcattagactggtcagaataaaaagagattttaacattagaaaggaggggcataatgaatttaaagcaatctatagaagagattattaatcaacctgaatatgaacctatgtcagtgtcagattttcaagatgcattaggtttaagcagtgccgactcgtttagagatttaattaaggtgcttgtggagttagaacaatcaggattaatcgaacgtacaaaaacagacagataccaaaaaaagcatagttatagaggtcaatcaaaattgataaaaggaacgttaagtcaaaataaaaaaggctttgcattcttaagacctgaagatgaggatatggaagatatatttattcccccgacgaaaattaatcgtgccttggatggagatactgttattgtagaaatccatcaatcaaaaggtgaacataaaggtaaaatcgaaggggaagttaagtcgattgagaagcattctgtaactcaagttgttggtacgtatagtgaagctagacattttggctttgttattccggatgataaacgtattatgcaagatattttcattcctaaaggtcaaagtttaggcgcagtcgatggtcataaggtacttgtacaaattactaagtatgctgatggttcagataatccagaaggacatatttctgctattttaggacataaaaatgatcctggcgtagatattttatctattatctatcaacatggcatagaaattgaatttcctgatgaagtgttacaagaagctgaagcagtacctgatcatattgaaaatactgaaattaaaggccgtcatgatttacgtgatgaattgacaatcacaattgatggtgctgatgctaaagacttagatgacgcaattagtgttaaaaagttagcgaacggtaatacgcaattaactgtaagtattgctgatgtcagctattatgtaacagaaggttctgcattggataaagaggcatatgatagagcgacaagtgtatatcttgttgaccgtgtaattccaatgattccacatcgattaagtaatggtatttgttcattgaatcctaatgttgatcgtttaactctaagctgtcgcatggaaatcgatgctagtggtcgcgttgttaaacatgaaatttttgatagtgttatacattctgattatcgaatgacgtatgatgcggtaaatcagattattactgaaaaggatcctaacattcgcgaacaatataatgaaattacgcctatgctagatttagcacaagatttatctaatcgtttgattcaaatgagaaaacgacgtggtgaaatcgattttgatattagtgaagcaaaagtattagttaacgaagacggtataccaacagatgttcaattaagacaacgtggcgagggtgaacgtctaattgaatcatttatgttaattgcaaatgaaacagttgctgaacattttagtaagttagatgtaccttttatttaccgagtgcatgagcaacctaaatcagatcgcttaagacaattctttgattttattacaaactttggcatcatgattaagggtactggcgaagatattcatccaacaacacttcaaaaggttcaagaagaagtagaaggtcgacctgaacaaatggtcatttcaacaatgatgttgcgttcaatgcaacaagcgcattatgatgatgtgaacttgggacattttggcttatcagctgaatattatacgcattttacatcaccaattagacgttatcctgatttaacagttcatcgtttaatccgtaagtatttaattgagaaatcaatggataacaaagaagtgaagcgttgggaagacaaattgcctgagttagctgaacatacttctaaacgtgaacgtcgtgctattgaggcagaacgtgatactgatgaattgaaaaaagcagaatatatgattcaacatattggtgatgaatttgaaggtattgtcagctcagtagctaacttcggtatgttcattgaattgccaaatacgatagaaggtatggttcatattgcgaatatgactgatgattattaccgttttgaagagcgtcaaatggcattaattggtgagcgtcaagctaaagtatttagaattggtgacacagttaaggttaaagtgacgcatgttgatgtagatgaacgattaattgattttcaaattgtaggtatgcctttaccgaaaaatgatcgatcacagcgcccagcgcgaggtaagacaattcaagccaaaacgcgtggtaaatcattagataaatcaaaatctgatgataagggtcgtaagaaaaaaggtaagcaacgtaaaggtaaaaaccaacgtaataatgataaatcaggtaatagtaagcataagccattttataaagataaaagtgtgaaaaagaaagcacgtcgtaagaaaaaataagcagcaatgaggtgagtatgaatggctaagaagaaatcaccaggtacattagcggaaaatcgtaaggcaagacatgattataatattgaagatacgattgaagcgggaattgtattgcaaggcacagaaataaaatcaattcgccgaggtagtgctaaccttaaagatagttatgcgcaagttaaaaacggtgaaatgtatttgaataatatgcatatagcaccatacgaagaagggaatcgttttaatcacgatcctcttcgttctcgaaaattattattgcacaagcgtgaaatcattaaattgggtgatcaaacacgtgagattggttattcgattgtgccgttaaagctttatttgaagcatggacattgtaaagtattacttggtgttgcacgaggtaagaaaaaatatgataaacgtcaagctttgaaagaaaaagcagtcaaacgagatgttgcgcgcgatatgaaagcccgttattaagcgatttagttgcttaatcgggctatatttgatatagttatatgtgcttttgtaaattacaaaagtatgatttgtttgatttattatttcggggacgttcatggattcgacaggggtcccccgagctcattaagcgtgtcggagggttgtcttcgtcatcaacacacacagtttataataactggcaaatcaaacaataatttcgcagtagctgcctaatcgcactctgcatcgcctaacagcatttcctatgtgctgttaacgcgattcaaccttaataggatatgctaaacactgccgtttgaagtctgtttagaagaaacttaatcaaactagcatcatgttggttgtttatcacttttcatgatgcgaaacctatcgataaactacacacgtagaaagatgtgtatcaggacctttggacgcgggttcaaatcccgccgtctccatatttgtagcctacagcctttgtggttgtgggcttttttattttgtgtttttcaggggataatgcattgcagaatttgttgtgagtattgatatagcagtgtttgtataggtgtttatttgatggaggaaagagtaataagtgattatgaattagtttttgagatataaggggacagtgatgtgtgtcaaataagtgtcaaaaaagttggattctgagttttacattcaacattgttcatgaagaaacttctttatacgcaaaaaattctccatgttatatatgtcaatataaaaatgtgaatcgtctacacttaattggataaatggctactgaaaaagaacttttcatttttgttacgtcactaagtgggtgtagttataaagagatgagccgagttttgatattttcattagaatcaatatgcctattaacacaatcagcaatagttgacgagacggaaataaaagaagtcgtagttaagaaatgcatttcacaacataccattgtagccatttttattgttttggatgataaactctttttggaatttttagtttttataatttgcaactacactacttcttttactaatattaatgtctaagtaatcgataaaaaattttccattgaataaatgagaagttaaaaactttacttaacctttctcattgcattttcctattcacgattttaagaacccaacatactacaaacgaattttaaaaggcgagagtaaagcttacttgtttattatacatatttaaaatccaagagtcagaacagactactcctctttataactataaaaaatagctatgaaaaaatctatcgtcatagattccttcatagctaatcttagtatgtttatttttattttaggatgctatttatcaactcaacatataactcactatttttataaccttctaatatatcattaacttgtctaataggtatttctggtacttctctaatgttttccaattttgttttaaattgtttttttgttatttgctctttatttgtagccaattggaacaagtaagaatctagcatattaatttctttatatgaatacatatatcttaataacactaaatctctagtttttaagttaggcgctagttcttcttgtaattgttctattgattgtttcattaataacaatctcatttctaattcttcattattcattttatcacactctttttatattaatgcttgaccaacttgggaaacccaaaaccctatgcttcttgcagtagaatctttaataccagttcccatcaatgcttgtgaaacttgaccttgtacatttccccatgtagcctcttcttgttttaatgcattattcaatgcgggatttacaaatttatcccatcttttttttatgattttccggcacggggactgatttctttaacaccattaaacacagattttttatttttaatcatagctttatagtatcatgttggctaagctataaataagtcagtttctctaaaaattaaataactgaatgtaagacaatcaacaaaccaaatttatacttcatctaaaccactgtggtcgtcatctttttgcttttctttttctttctctcgttcttgttcttttttgtactcttcttcaaattctttttctttcttttctacttcttctcttgtttccgctctatgagaaaaatcttcggttttaagtttactaaatttgaatgatttagaatcaactgttttatcttctgagtatttatggacatttaaattaatatttccatcacctcttaactcatagataaacatggcttgtgcagttttgccttttttaatttgatcttggttatgttctgtccaatctttatattttttatcacttaaaagataaccatctcttaatttatttactgtatttttatcatcttgagtgatattaatatagtcatgagaaatagaagatggatttaaatctttatcgtcttttttagcagtaatttccattttaaaagcgatatatttctttttctcatctttttcattgatgataaacggttcttttattttagcttcaaatttgtcactaacaatagtatcgcctttaatttttatatccatattttttttgcttttaaattctttaagttcttcatttaattcttcattgtcattttctttctttttgtgactagtgctctctttttttgcactatcttgatgatgtccacaagcacctaagataagtgtacttgctaataatatccccattacttttttcatttaacatgtctcctttatttcgcaaaaatttattttaaaaactctaaatgacttatcattttgagtaattaaacaaagttgatattttgtgagattctaagatgatattaaataattcttgtaataatgatcctatgtattgttgcaataaattaatgaaactataattactaatattatattacttttattgatagaaatatattacttttttaaaaaaacttgtaatatatcgaaagatttaaatgtaaaattttgatttgttaagaaattacgtttgtaaaaataaaaaaatcaacttatttgtatgagataaatatgtattgaagaagacgtgttattaatttggaaaatactggtcaaagatgggagctcttaaaagcgttattgtattttttagtcaatacaaatagattgccgtaataataatcgtacttgatggttaaaaaattacttaaggctataaagcaaaactttttatatgagcagtcgaatataacgtttaaaatgattgtttttggatataaacgattaagtaaaatgctttttcagtttgaaattaatcatataaatttcttatgggagggttgatatcttaatgattaacattatttcagctataggatctattggaacatttattatggctttattttattttgtatcagtttcagttcaactttatcaaatgaaaattagctttctgccagctttaggttttaaccaaattttattagaaagggaggaggatcaacttaatataatgaattcggcaacagaagagcatcatcataaagattatattaaactatataatttaggtggcggtgctgctaaaaaaattgcaatagaggttttattggggaaggataaagtcattcagaaaaaatacgtgcatattttacctagtaaagaagggtacatgttaccaattaataaaaatgtgtacgaagaattagaaagaacgattgagaacaatggtcatgaagctgatttgaatgtacgtatgacttattatcataatgtaagtcgcaaacaacaggaagttatattaaaaggtcaaatcgaccgttttaatacttataataataaagaaatttatgatttgcagtttatctaaaaattgatttaagagggtagttgtttattgcgaaaaatatcattcaattttaatgaaataatggcgtcattactataaaatattactttatgttgtaatgcatttttctataagatagaactaaaaggaggggcaaagatgcaaattagacaaatacatcaacatgactttgctcaagtggaccagttaattagaacggcatttgaaaatagtgaacatggttatggtaatgaatcagagctagtagaccaaattcgtctaagtgatacgtatgacaataccttagaattagtagctgttcttcaaaatgaagttgtagggcacggtttactaagtgaagtttatcttgataacgaggcacaacgggaaattggattagtgttagcacctgtatctgttgatattcatcatcaaaataaaggtattgggaagcgattgattcaagcattagaacgagaagcaatattaaaaggatataattttatcagtgtattaggatggccgacgtattatgccaatctaggatatcaacgcgcaagtatgtacgacatttatccaccatatgatggtataccagacgaagcgtttttaattaaagaattaaaagtgaacagtttagcgggaaaaacaggtaccataaattacacatctgcttttgaaaaaatatgatttcaagctaggattacattaggtagagttcatattaataataaaaaatgtttgcaatcaaatcgtacgttgtcgtttgtaattcttaaaatagcaataaataaaatgtttgttagtaaagtattattgtggataataaaatatcgatacaaattaattgctataatgcaattttagtgtataattccattgacagagattaaatatatctttaaagggtatatagttaatataaaatgactttttaaaaagagggaataaaatgaatatgaagaaaaaagaaaaacacgcaattcggaaaaaatcgattggcgtggcttcagtgcttgtaggtacgttaatcggttttggactactcagcagtaaagaagcagatgcaagtgaaaatagtgttacgcaatctgatagcgcaagtaacgaaagcaaaagtaatgattcaagtagcgttagtgctgcacctaaaacagacgacacaaacgtgagtgatactaaaacatcgtcaaacactaataatggcgaaacgagtgtggcgcaaaatccagcacaacaggaaacgacacaatcatcatcaacaaatgcaactacggaagaaacgccggtaactggtgaagctactactacgacaacgaatcaagctaatacaccggcaacaactcaatcaagcaatacaaatgcggaggaattagtgaatcaaacaagtaatgaaacgacttctaatgatactaatacagtatcatctgtaaattcacctcaaaattctacaaatgcggaaaatgtttcaacaacgcaagatacttcaactgaagcaacaccttcaaacaatgaatcagctccacagagtacagatgcaagtaataaagatgtagttaatcaagcggttaatacaagtgcgcctagaatgagagcatttagtttagcggcagtagctgcagatgcaccggtagctggcacagatattacgaatcagttgacgaatgtgacagttggtattgactctggtacgactgtgtatccgcaccaagcaggttatgtcaaactgaattatggtttttcagtgcctaattctgctgttaaaggtgacacattcaaaataactgtacctaaagaattaaacttaaatggtgtaacttcaactgctaaagtgccaccaattatggctggagatcaagtattggcaaatggtgtaatcgatagtgatggtaatgttatttatacatttacagactatgtaaatactaaagatgatgtaaaagcaactttgaccatgcccgcttatattgaccctgaaaatgttaaaaagacaggtaatgtgacattggctactggcataggtagtacaacagcaaacaaaacagtattagtagattatgaaaaatatggtaagttttataacttatctattaaaggtacaattgaccaaatcgataaaacaaataatacgtatcgtcagacaatttatgtcaatccaagtggagataacgttattgcgccggttttaacaggtaatttaaaaccaaatacggatagtaatgcattaatagatcagcaaaatacaagtattaaagtatataaagtagataatgcagctgatttatctgaaagttactttgtgaatccagaaaactttgaggatgtcactaatagtgtgaatattacattcccaaatccaaatcaatataaagtagagtttaatacgcctgatgatcaaattacaacaccgtatatagtagttgttaatggtcatattgatccgaatagcaaaggtgatttagctttacgttcaactttatatgggtataactcgaatataatttggcgctctatgtcatgggacaacgaagtagcatttaataacggatcaggttctggtgacggtatcgataaaccagttgttcctgaacaacctgatgagcctggtgaaattgaaccaattccagaggattcagattctgacccaggttcagattctggcagcgattctaattcagatagcggttcagattcgggtagtgattctacatcagatagtggttcagattcagcgagtgattcagattcagcaagtgattcagactcagcgagtgattcagattcagcaagcgattccgactcagcgagcgattccgactcagacaatgactcggattcagatagcgattctgactcagacagtgactcagattccgacagtgactcagattcagatagcgattctgactcagacagtgactcggattcagatagcgattcagattcagatagcgattcagattccgacagtgattccgactcagacagcgattctgactccgacagtgattccgactcagacagcgattcagattccgacagtgattccgactcagatagcgattccgactcagatagcgactcagattcagacagcgattcagattcagacagcgattcagattcagatagcgattcagattccgacagtgactcagattccgacagtgactcggattcagatagcgattcagattccgacagtgactcagattccgacagtgactcagactcagacagtgattcggattcagcgagtgattcggattcagatagtgattccgactccgacagtgactcggattcagatagcgactcagactcggatagcgactcggattcagatagcgattcggactcagatagcgattcagaatcagacagcgattcagatttagacagcgactcagacagtgactcagattcagatagtgactcggattcagcgagtgattcagactcaggtagtgactccgattcatcaagtgattccgactcagaaagtgattcaaatagcgattccgagtcagtttctaacaataatgtagttccgcctaattcacctaaaaatggtactaatgcttctaataaaaatgaggctaaagatagtaaagaaccattaccagatacaggttctgaagatgaagcaaatacgtcactaatttggggattattagcatcaataggttcattactacttttcagaagaaaaaaagaaaataaagataagaaataagtaataatgatattaaattaatcatatgattcatgaagaagccaccttaaaaggtggcttttttacttggattttccaaatatattgtttgaatataattaataattaattcatcaacagttaattattttaaaaaggtagatgttatataatttggcttggcgaaaaaatagggtgtaaggtaggttgttaattagggaaaattaaggagaaaatacagttgaaaaataaattgctagttttatcattgggagcattatgtgtatcacaaatttgggaaagtaatcgtgcgagtgcagtggtttctggggagaagaatccatatgtatctagtcgttgaaactgactaataataaaaataaatctagaacagtagaagagtataagaaaagcttggatgatttaatatggtcctttccaaacttagataatgaaagatttgataatcctgaatataaagaagctatgaaaaaatatcaacagagatttatggctgaagatgaggctttgaagaaattttttagtgaagagaaaaaaataaaaaatggaaatactgataatttagattatctaggattatctcatgaaagatatgaaagtgtatttaatactttgaaaaaacaaagtgaggagttcttaaaagaaattgaagatataaaaaaagataaccctgaattgaaagactttaatgaagaggagcaattaaagtgcgacttagaattaaacaaattagaaaatcagatattaatgttaggtaaaacattttatcaaaactatagagatgatgttgaaagtttatatagtaagttagatttaattatgggatataaagatgaagaaagagcaaataaaaaagcagttaacaaaaggatgttagaaaataaaaaagaagacttagaaaccataattgatgaattttttagtgatatagataaaacaagacctaataatattcctgttttagaagatgaaaaacaagaagagaaaaatcataaaaatatggctcaattaaaatctgacactgaagcagcaaaaagtgatgaatcaaaaagaagcaagagaagtaaaagaagtttaaatactcaaaatcacaaacctgcatctcaagaagtttctgaacaacaaaaagctgaatatgataaaagagcagaagaaagaaaagcgagatttttggataatcaaaaaattaagaaaacacctgtagtgtcattagaatatgattttgagcataaacaacgtattgacaacgaaaacgacaagaaacttgtggtttctgcaccaacaaagaaaccaacatcaccgactacatatactgaaacaacgacacaggtaccaatgcctacagttgagcgtcaaactcagcaacaaattatttataatgcaccaaaacaattggctggattaaatggtgaaagtcatgatttcacaacaacgcatcaatcaccaacaacttcaaatcacacgcataataatgttgttgaatttgaagaaacgtctgctttacctggtagaaaatcaggatcactggttggtataagtcaaattgattcttctcatctaactgaacgtgagaagcgtgtaattaagcgtgaacacgttagagaagctcaaaagttagttgataattataaagatacacatagttataaagaccgaataaatgcacaacaaaaagtaaatactttaagtgaaggtcatcaaaaacgttttaataaacaaatcaataaagtatataatggcaaataattaatgcatggctgcaaagcaaataatgagtttgtcgtaaaaataacaacattttaaactagcaataaataatatcaaagtcatcatttcaatgatgcaatctagtatagtccacattctaaacaggtgtggactattacttttttcactttatattacgaaaaaattattatgcttaactatcaatatcaataattaattttaagctgaaaaacaataaaaatgttaagacaacgtttacttcaagttaattattatactgaaaattctggtatataatgctgttagtgaatataacagggaaattatattggttataatattgagtctatataaaggagaaataacagatgaaaaagaaattattagttttaactatgagcacgctatttgctacacaaattatgaattcaaatcacgctaaagcatcagtgacagagagtgttgacaaaaaatttgtagttccagaatcaggaattaataaaattattccagcttacgatgaatttaagaattcgccaaaagtaaatgttagtaatttaactgacaataaaaactttgtagcttctgaagataaattgaataagattgcagattcatcggcagctagtaaaattgtagataaaaactttgtcgtaccagaatcaaagttaggaaacattgtgccagagtacaaagaaatcaataatcgcgtgaatgtagcaacaaacaatccagcttcacaacaagttgataagcattttgttgctaaaggcccagaagtaaatagatttattacgcaaaacaaagtaaaccaccacttcattactacgcaaacccactacaagaaagttattacttcatacaaatcaacacatgtacataaacatgtaaatcatgcaaaggattctattaataaacactttattgttaaaccatcagaatcgcctagatatacacatccatctcaatctttaattatcaagcatcattttgcagttcctggatatcacgcgcataaatttgttacaccagggcatgctagcattaaaattaatcacttttgtgttgtgccacaaataaatagtttcaaggtaattccaccatatggtcacaattcacatcgtatgcatgtaccaagtttccaaaataacacaacagcaacacatcaaaatgctaaagtaaataaagcatatgactataaatacttctattcttataaagtagttaaaggtgtgaagaaatatttctcattttcacaatcaaatggttataaaattgggaaaccatcattaaatatcaaaaatgtaaattatcaatatgctgttccaagttatagccctacacactacgttcctgaatttaagggtagcttaccagcaccacgagtataaaaattggcactaagtttacgagatatgataaatacctattattttaaatatagtctacaatctatgtggttgtaggctgtattttttgcagtttatcaataaacacccatcaacaaattataccgtttttctactttgaaagttggaagtaacataatcttaaataaatatattattaattaagataaatataatactcaagattattgttaatagtttgttcatcgcaagttaattattgtttctaaaatattggtatataattttcaatggcgaagaaaacagggtgaaaaagtcggtttttatatcaaagcaaataagggagcataaacaaatgaaaaggaaagtattagtactaacaatgggtgtaatttgtgcaactcaattatggcattctaatcacgcaaacgcattagtaacagagagtggcgcaaatgatactaagcaatttactgaaattgtatcggaagagaaagttataacagttgaacatgctcaaattaatatttttcaatctaatagcaattcaaacttgatggagttcaacatattaacaatgggcggtaaatcaggagctatggttggttatagtgaaattgactcatcacatttcacagaccgtgacaaacgcgttattagacgtgatcatgttaaagaagcacaaagcttagtagagaactataaagatacacaaagtgctgatgctaggatgaaagccaaacaaaaagttaacacattaagcaaaccgcatcaaaactatttcaataaacaaattgataaggtttataatggattacaacgctaatccaaagtaaattataagttatacatctcgtttttaaatgacaatttatccccgtaaatattataaataatcttttcaaattccacatagatatagagacactaataaacctctttgtctcgatatgatagtctgcaacgattcatgttgtaggctttttaattttacaaataaggctaaatatataagttctggcacctaaaatatagaaaatacataaaagtaagtatagttattttattataattattaaatttttattaattaattgtaaaaatgtataattataattaattaacgtttaatattaaaattaactaaaaagaaagaggtgttagttatgacagaatacttattaagtgctggcatatgtatggcaatcgtttcaatattacttatagggatggctatcagtaatgtttcgaaagggcaatacgcaaagaggtttttctatttcgctactagttgtttagtgttaactttagttgtagtttcaagtctaagtagctcagcaaatgcatcacaaacagataatggcgtaaatagaagtggttctgaagatccaacagtatatagtgcaacttcaactaaaaaattacataaagaacctgcgacattaattaaagcgattgatggtgatacggttaaattaatgtacaaaggtcaaccaatgacattcagactattattggttgatacacctgaaacaaagcatcctaaaaaaggtgtagagaaatatggtcctgaagcaagtgcatttacgaaaaaaatggtagaaaatgcaaagaaaattgaagtcgagtttgacaaaggtcaaagaactgataaatatggacgtggcttagcgtatatttatgctgatggaaaaatggtaaacgaagctttagttcgtcaaggcttggctaaagttgcttatgtttataaacctaacaatacacatgaacaacttttaagaaaaagtgaagcacaagcaaaaaaagagaaattaaatatttggagcgaagacaacgctgattcaggtcaataatgctcattgtaaaagtgtcactgctgctagtggcacttttataatttttagatcacgatatgatttattatcaattcagaattaaaaaagtaaatagtatcaaaagtaagtgtatttaatattagaaaataaaaattttaaatttagtattaaaatggaatgttactatatagttcaatgtgtattatcacagaaaataaaataatgctttacttctatatttaaaagtgtataatgaaagttaagtaataaagagcgtgaagaaaaatgtgagttatttatatagaatattctccttttcatttatgaatttgttacaaaatatttagtgcaaaagcacgacggaggtattcaatatgaataacggtacagttaaatggtttaatgcagaaaaaggttttggtttcatcgaaagagaagatggtagcgacgtattcgtacacttctcagcaatcgctgaagatggatacaaatcattagaagaaggccaaaaagttgaattcgacatcgttgaaggcgaccgtggcgagcaagctgcaaacgtagttaaaatgtaattttaacttattcaaacagtccttactatagggctgtttttttatgctttaaatcgataacagttggtgtggtaaaagcactagccgttatttttttgtccaataaatttagttggagatttaacaatatataatggttctaaaataaatcgaactgatggaaaagttttttacttttcatctgtccgacttttgattttgaatataaaaaagcgccaatacagaactttaataatgacgagaattaaagtctgtatatggcgataacaagaagtaatgttaaacactcaaaatgtttaacaataataggataccacatcgcataatatcttactacttaattaataatttaactaatcaactttttgttaattttttattaagactgattaattattgagaatatttattgtttttaaaatctcataataattcagtaatcttgttttcatttaaaaggcgaaacattaaaataattaaataaaaatattgcgtttaatttacagcgtcaaatatacttatttctaatgctttggggtctactgaaacaagtaaagaatgatcgatgttactaatattgccattctccaaatttatttctgtgagtatttggaagctaccattaggcaacggtttaacaatagacaattgcttttccgcttgttgtattaaaaaaggttttgtagattgattattaatatgccattcactcatgtatgtttttcactcctgctttaaaatagggttagaaagtttatagttgagacattcatgttcaaccaaaattttgttcgaattcaataaatgtcttgtttaaaatagaaatattgtaaatgttatcgtccaaaacttcaccagttaagtatttgttttgaattaaaatttggcagttagttaagaagtcttgataatcacgatcgcaaaaatagttttcacgtgcatctttagcatcgccaaaaaagttagcgactgtttctgtttctcctttattcgaacgttcaatatataatttgtaaaatttagctattgtatacttttgttctttagttagttcattcaaaatattgggcctcctgaaatatcatttgtaatctatacccaatttattgcaaaacaaaaactaatttaactatttgatgaaactgtgttaataagctttaacaagccttagtttgtatggatctataaaattatctttaattgcatagggtgaaataatatgtagtccataacttttaactgatttttcacttacaccaaatttataagcttggtagataattttagtacaatacgtaaattttttgctgttcaaatttaatgtaactagataacgatgatttgtattctcatagtttttcttaacccattcagccgcttttttacctgcaccaggatagctgcaacgataaactttcatccaatcatttttgccacttgcataattatatttaaaagattcgaaggattgtgtagttggtttgtcgccaggcccctcaatttgtaaaatcgttttatcatcaatcgcgatactacaatgaccaaaaaatccccacatgacagggccttttgtaacaataatatcaccaggttgtaattggaatttgtcatcttgaatttctgaatacttattatctgcaattgtttttggtgagtttattggggatacgacaacgaataatataagtaaaattatcgttcgtttaatatagttcacttaaaagctccttgttgaagaaatatatgtaaatagtcttaaattagaattgtaatctttaataagcttgtaagactaaaacatatcttaaatattaaagtatgagagtgtgaaatgtctattaagaataaaaaacagtctgaaacatcattgagacgtttcagactggatataaaatgaatttcatttatagcacaccaaatataaatgtgtatattaatatagcgaatccaaaaatatagagaatgacagtgaaacttaaataggactcttttttagattctttgctagtttttttcattaatacgagtataaacgtagcggcaactaagaaaattaatgctagccaaaacagaattgcaaaatgtaaagacatgtgaaaccctccttatataccgtaattattaacctataaaactataaaaaataggataaatgtaatagagaacgagtacgatatttataaaaaataatatttcacttaaccagtttttagttatcattgcaatggtaaaggatacgatgagtatcacaccacaaatgataataccaggcaggagccaacataaatcatctaaatctttattatatgtgattaaaatattaaagataacaaaagtggtagtaataactatattgatagcatttaacaaaatgttattcatgactgacacctactagtataaaaatagcttcttaataaatatgataacactatttttcaataggtaaataaaaagtatagttatttttaaaatattatttgcagaatgctaaagtttattaattcaaacaagtgagcatatataggggtgtattgtattaatatgaaaagaatatttacatactaaaaactcttaaagttgtataattcgttaatatttttagaatcagatatcaaaaaaatgtgcaaaatcacttttgcacatttacaaatactagttttctgataagattaataataacactttaaatagcgcttaataaatgaagggggcaagtcttatgacgttttacaatttcatcatgggttttcaaaatgataacacaccatttggtatattggccgaacacgttagtgaagataaagcattccctcgattagaagaaagacaccaagtaattagagcatatgtgatgtctaattacacagatcatcaattaattgaaactacaaatagagctattagcttatatatggcaaattaatttgagtagtaccaattatgatgtattagtgcatcccaaatatcttttgttttaaagtttatttcatcatttcttatcgaaaatggtgtaataatgtctttatctaaccaagtgttgataagttcatttggtacaccatctaacaacatttcacttttactaattataaaacattcccagtcaagtgaaacattttgtggattcacataattacattgattatgattatccataaacactcactcctttaaaattctgtactcttcattgcgttttaccccgtcacattatcttttaaactaaaatcatcattacttatgaaaaaaatgtacatcaaaagcaaaggttttcgctaccgaaaaagtttaaataatggtttaatatatttggtactcattttaataaaaagagaatacattttgagctatcaatactttttattgaagaggtgttattgttggctaaaacgttatatttaatgcgccacggacaaactttgtttaattttaagggactaattcagggatttggagattcgccgctaacagaacttggaattgctcaagctcaaaaggcacgtagttattatgaaactaaggggataaacttcgatttatatgcatcatcaacgcaagaacgcgcaagtgacacacttgaaaatgttgcacctaaccaatcgtatcaacgttttaagggactgaaggaatggcattttggaatatttgaaggtgagtcagtctatctatttgataatctatacaagcctgaggacttattcggagatcgaattgttcctttcaaaggagaggcaaggcaacaagttgaagaacgcattgtgaaaactttacatgacattatgtctcaaacaaagaataatgcattagtcgtgagtcatggaacaataatgggagtatttttaagatattgccttaaactagatgaagcattaaagcataatatcggtaattgtaatatcctgaaatttgaatatgacaatggaacatttaaatttgttgagttaattgatccaaatttataataaataaagcgttatacatagacacaagtatgtcttttgtataacgcttttaaaatacaactacataacgctttagaataataattgaataagtttttgtaatatcatcagagcaacaataataattattatgcttgatattttattgattattgttaataattttccggttttatcaattgatccaaccatttttcctaaaattgcgagtaaaaagaaccataaccatgaaacgctaatacaagcgattgtaaacgcaattttattgctgccactatataatgcagcactactaccaattactccaattgtatctaaaatagcatgtggattgagtaatgaaactgataaagcaaaacttacttgtttcattggagacataatttgagtttctccatctgttgagggtttatcatgccaaatggtccaagccatatacatcaagaaaattaaaccaactatataaataattgcttgaagtacaggtaaagacataataatgatagatactcctaccactgcaataataataagtaagctgtctgacaacccggctgtaattattgcaggcaatacatatctatattttggttgattagctccttggttaaaaataaatacattttgtgcacctaaaggtaaaattagaccaatcgctaagataaatccatgaataattgcggttaccattaagttttgacacccctaaaacatagaatattctgaaaaaacttattgttatcatatcaaataaaaaacaactactcaatagtagagtagttgtatgaaaaatagaacctatatgatttgaatttatgagaaatgtagaatatataaaactgtattacttattaatcaaatcataaaaaagccaatgttcatcgaaataggtatttccgattttaattgcatttttctcaaaaccaagaatgtcgaatcctagtgcactatagaaaactttagcacctatgttgtttgacacaattgatgtaagtaaagattcgtaattgttctgccgtgcataattaataatgaaattaatgagctcgctattaatcgatttatcgttattagtaacaaagttgtatttaattaatgatttatgttcttttccaacgtatcgaatttgttctaaggcagctgttgcgataagtgtttcgttttcataacagccaaatacaatacatttcggtgaaccttgatttaaaatgtcatgtattaaggtgtcagtcattgtttgactataatgtgaatcttgagtgaattcttcattgactgtcgaaacaagtctcttatactcattaaaatcattattcgttaatgttttaatttcaatcattactgacctccttaatcattattaagaaagattttgtactaaaaaaatttcttaattacatattaaaatgtttattaaaattttgcaatcactgatttatatgcacattcttgtaaatggattatcaatttaattatatttatttttaagttcaggaaattatggaattggttattggtcgacactggacttttatttgtagacggtatgcgaagaagtcaagccagtattggaaccggtcacatttatgatgactaaggtacaatcattttcagttaaatattgccagaaatttcaatcacgaatagaaaaaataaccaaccaaaaatttttggttggcaaatttgaattttatgtgaattttattaataacgttgaataatctctttaagttaatgctaatctacaacatttacatttaaatcgacattaatatttccttgagtcgcttttgaatatggacaaaattcatgagccatttgtaaatatttttcagcttcttcttgagatataacatttttaattgtcgcatcaattgaaacacttaatttaggactttctgagtctgaatcatcttctagtctcactgttagtgttacttctggatgagcatcacgcactttgttttgctttaaaattaggtcgaaagcaccgttgaagcaagatgcataacctgctgcaaataattgttcggggttagtagctttaccatctgcttgagcaggcggaacgatatcaatatctaatgctcgatcatcagtataaacatgtcctttacgtccgccaacattcgtcgctttagtttcataatgtattgccatacttataacctcctaatttaaaatacatttatgctttacccattcgaaaataccttaatcattttcatttatagcattgtttgattgaaggataaaaagttgttgtttacaataaaaataatgagtatctgaaatgagggattcactatgacacatgtggaagtagtagcgactatcgcgccacaattatctatcgaagaaactttaattcaaaaaattaatcatcgtattgatgcaatagacgtattagaattacgaattgatcaaattgaaaatgtcacagttgatcaagtggcagaaatgattacaaagctgaaggttatgcaagattcattcaaattattagttacgtatcgtacaaagttacaaggtggctatgggcaatttacaaatgactcgtatcttaatttaatatcagacttagcaaatatcaatggcatagatatgattgatatagaatggcaagcagatattgacattgaaaaacatcaacgaatcattacacatttgcaacagtataataaagaggtggttatatcacatcataatttcgaaagtacgcctccattagatgaattgcaatttatattttttaaaatgcaaaaattcaacccagaatacgttaaattagcagtaatgccacataataaaaatgatgtgttaaatttattgcaggcaatgtctacattttcagatactatggactgcaaagttgttggtatttcaatgtctaaacttggactaataagtagaacggctcaaggcgtttttggtggtgcgttgacttatggttgtatcggagtaccacaagctccaggacagattgatgttactgatttaaaagcacaagtgactttatactaataaaatgaattaggttgcttttgtgtaagtgctgtcttataattgagaagtattatcattgttcgtggaggagcgattttagatggaattacaacaagcaatagctaatagaagaagtgtgaaaaaatttaaaagagatatgcacatagatgacgcattgctatatcaagcaattgagaaagctgctgatgctccaaatcacggaatgagggaaccatggagagttgtgcatgttccgaaagacagattaggagatatgagtaaggatatttctaaatttgcatttcctaatgaattagataagcaacaatgtcattatgatgcagttacgaaactaggtggcatgttattgcttattttaaaaacagatccaagacaacgtcaaaatgatgaaaactactttgcatttggtgcatatgcacaaaatcttatgttgttactttatgaagcgggaataggtacatgttggaaatcgccattatatatctatgatcctaaagtaagaaaaacacttggtataaagaaagatgaagttcttgctggattcttatatttaacggatttagaagaagatatgcctaaagcaccacgtaaaaatagaaacttaattacattatattaatatgtataattatagaaacattaataaaagctgagtcatgaattgatggacatctatcgagttagagatttaatctaacttactagagtcggtacaataacagtctcagctttttattgtgcagtatatacacatttttattttagtatttatttaaaagtttctgctaaaaatgattcaacttgttcaggtgacttagcatttgctgaatgaaggtgtgcaattttatcgccgtttttaaatactagcaagctagggatacccataacttcattttcaacaactacatcttctaattcatcacgattaacagtataccattggtaatcattatattgttctacgattgggtcaatccataaatccatagcacgacagtctgggcaccatcctgcctcaaatttaacaattacaggtgtatcgctattaattacagatttaaatgattcattacttttgattgattgcattgtaacaactcctctagatagtttaataatttttattatagctaaatttatatcataataaaaaattttagcttcaaaatgaaagccttttgctttggaaaatgatatatttattttaaatacataaaggaggttgcagtcgtatgattaaattttaccaatataagaattgtacaacttgtaaaaaggcagcaaagtttttagatgaatatggcgtaagttatgaaccaattgatatcgttcaacatacacctacaataaatgaatttaaaacaataattgcaaatacaggcgtagaaattaataaattgtttaatacacacggcgcgaaatatcgtgagcttgatttgaaaaataaattacaaactttatcagatgatgaaaagttagagttgttatcatctgatggtatgttagtaaagcgtcctctagcagtaatgggcgataagataacattaggatttaaagaagatcaatataaagagacttggttagcgtaagtgaaatgtaagcgtttactaaatatctcgatatttagattcattacatgtaaaatgaaataagctatacaattgttaatttttataaatatagttgaatagcatctagccttatggcatcattaatgatgtaaagattaattaggaggggattctcttggcagtaccaaatgaattgaaatattcaaaagagcatgaatgggttaaagttgaaggtaatgtagcaataattggaatcacagaatacgcacaaagcgagttaggtgatattgttttcgttgaattaccagaaacagatgatgaaattaatgaaggggatacgtttggtagcgtagaatcagttaaaactgtatcagaattatatgcaccaatctctggtaaagtagttgaagtcaacgaagaactagaagatagtcccgaatttgtaaatgaatctccatacgaaaaagcatggatggtaaaagtagaaattagtgatgaaagtcagattgaagctttattaacagctgaaaaatattcagaaatgattggtgaataatcaccgtgtaactccttaatctaagattgaggagtttatttttagtctgagaaaataaatgatatgaaagaaaaattattaggtactattatttggagtattgctacattttattattcaagaatgatggaaataatgaatttagctattttaaaaataaaaattgggggaagttaatatgctaaacattcaagacgttagtcatctttctaaaaaggagcaaaaagcatataaccgtttcgtagaatctgtagaaaacggtaatttaccagtactaccatgtattgaaatggatctaaaagagatgcaagaagaaacattaaaccagagtaagattggtggaatgccatttttaaaatcttttaaagatataccattagatgaaaataatgtaccaatggtattgctagcacagattaatttggatgatcttccagaacaacaagaattatttcctgtaaaagaagggatattgcagttttggattagttcagaagatcaaatgtatggaatgtctgaaaatttaaagggaaacaatataaactcaaggcttgtttatataaaagagccaattacagatttatcactcgaaaatattcaagcgcatttgaagtcattagatgctgataatgaggatatcccgttcagtggagcattttctatagaatttagattgtcgaaacaaactattacatgtactgattataagtacgatgaggacgtgcttgcattgtggaataaagtcaatccatccttcgcgctaaaatcaatgtttggtggttatgatgaattgatggaacctgtgtgtaacacatttactgctaaggaaccatttaatcaacttggtggttatccatattttgaccaaatagatccaagaacgaacgatcaagaactgaaaatgtatgatagagtcttactgcaaattgattctacaagagatggtaattcttcgattatatggggtgatttaggtattgccaatatcttagtgaaatctactgaccttgaggctatgaagtttgatgattacatgtattcatgggattgcagctaagagaatcataaaaatatattactttaataagtgtagtatctatagatcaatctagggagtgggacataaatgatattttcgcaaaatttatttcgtcgtcccaccccaacttgcattgtctgtagaaattgggaatccaatttctctttgttggggcccatccccaacttgcattgcctgtagaatttcttttcgaaattctctgtgttggggcccctgactagaattgaaaaaagcttgttacaagcgcattttcgttcagtcaactactgccaatataacttcgtagagcatagaacattgatttatgtcccagcctgttttcataagccacagctaatgtgtatttaaaaataggaatacatgagtaaaactcatgcataagaaatactaatttctaaagaaaaagtatttctttatgttggggccccgccaacttgcacattattgtaagctgacttaccatcagcttctgtgttggggccccgctataattgaaaagtttgttataggtgtattttcttttggttaactattgttaatataacattgtagattttaggatgttgatttttgacttagcctttgtctgcttatgttaaatgttccagctagtcaaacattgagtttgtaattattatattaagctagtttaaattttttgtgatttatgttttattcataccaattttgtgaaatgatacagtgacagatgtttattgattttaaagggtgatgatgatggctattgtaaataaagtgataattgttgaaggaaaatctgataaaaaaagggtgcaacaggttattgcagaaccagtcaatattatttgtactcatggaacaatgagtatagataagcttgatgatatgatagaatcactgtatgataaacaagtttttgtattagccgattctgatgacgaaggagatcgaattagaaattggtttaaacgttatttgagtgaaagtgaacatatatttattgataaaacttactgtcaagttgcgaattgccccaaacaatatttggcgcatgtactttcaaaacatggctttacttgtaagaaagaaacacctcttttaccgaatataaataatgaaaggttagttttagtaaatgaataattcattagacatcaaagatgtaactacattttatgaggaagacaaacatttaatctttggttatacaccaacgtgtggtacttgtaaggtttcagaaagaatgttagacattgctaatgaaatattgcagttaccattattgaaaatagatttaaacttttatcctcagttttgtaaagatatgcaaatcatgtctacgccgattttattgttgatgaataaagataaagaagtaaaacgaatttatgcatttaaatcggtgactgatttgttagaaaatttaaaatagttattgacgaaattttactaaggtgttaggattaatacaaattaaatgatgcgtaaactcttatcgagagtggtggagggatgtgccctacgaagcccggcaaccgtcttatatagaaatggtgccaattcacataaagttttaacttttgaagatgagagaaacaatactactattgctttctcaatttttctatcgatattgagaaagcattttttattttattaagcaacacagggaggaatcaacgtgattgaattaaaagaagttgttaaagaatatcggactaaaaataaagaagtccttgctgtagatcacgttaatttatcgattcgagcaggatcgatttatggcgtcattggtttttctggagcaggaaaaagtactttgattcgaatgtttaatcatttagaagcgcctacatcaggtgaagttattatagatggagaccatataggtcaattgtccaaaaatggattaagagcaaaaagacaaaaagtaagtatgatcttccaacattttaatttgttatggtcaaggactgtgttaaaaaatattatgtttccgcttgaaattgcaggtgtccctagaaggagagctaagcaaaaagcattagaacttgtcgaactcgtcggtttaaaaggtagagaaaaggcttatccatcagagttatcaggtggacaaaagcaacgtgttgggattgcacgagcgttagctaatgatccaacggtcttgctttgtgatgaggcaacaagtgcacttgatccgcaaacaacagatgaaattttagatctactactaaaaattagagaacaacaaaatttaacaattgtactaattacgcatgaaatgcatgtcattcgtcgtatttgtgatgaagttgcagttatggaaagtggtaaagtgatagaacaaggaccggtgacacaggtttttgaaaatccgcaacacactgtgacaaaacgatttgtgaaagacgatttaaatgatgatttcgaaacatctttaacagaattagagccattagaaaaagatgcatatatcgttagattagttttcgctggttcaacaacaaccgagcctattgtatcgagtctatcaactgcctatgatattaaaattaatattttagaagcaaatattaaaaatacaaaaaatggaacagtcggctttttagttctgcatattccatatatttcaagtgtagatttcggaaaattcgaaaaagagttaattgagcgacaagttaaaatggaggtgttaagacatgggtaaatcatttagtgaaattataaatgaaatgattacaatgcctaatattcagtggccagaagtttggactgcaatagtcgaaacactatacatgacagtcgtctcaactatatttgcatttatacttggtcttattttaggtgtgttattattcttgtctgctaaaggtaagtctatcggtgcaaggttattttattctatcgtttctttcattgttaacttatttagagcgataccatttattattttaattttattattaattccatttacaagtttgatacttggaacgataagtggtccgacaggtgcgttaccagccttgatcattggcgcagcaccgttttatgcaaggctcgtagaaattgcttttaaagaaattgataaaggtgtcatcgaagcggcttggtcaatgggcgctaatacttggacagtaattcgtaaagtccttttacctgaagctatgccagcgctagtgtctggcattacagttacagcaatcgctttagttggttcaacagcagttgcaggtgtaattggtgccggtggtttaggaaatttagcatacttaacaggtttcactcgaaatcaaaatgatgtcattttagtatcaacagtttttattttaattattgtatttataatccaattcattggggattggcttacaaataaacttgataaacgataaattgggggtttcattttatgaaaaaattatttggtcttattttagtattaacatttgcagttgtattagcagcttgcggtaatggaaacaaaagtggcagtgacgacaagaaaataacagtaggtgcttcaccagcaccacatgctgaaattttagaaaaagcaaaaccattattagagaaaaaaggttatgaactagatattaaaacaattaacgattacactacacctaataaattactagacaaaggtgaaattgacgcaaactatttccaacatacaccatatttaaacacagagaaaaaggataaaggttacaaaatcgtaagtgccggtgatgttcacttagaacctatggctgtatactctaaaaagtataaaagtttaaaagaattaccaaaaggtgcaacagtctatgtgtctaataatccagctgaacaaggacgtttcttaaaattcttcgttgatgcaggtttaattaaaatcaaaaaaggcgtaaaaattgaagatgctaagtttagtgatattacagagaataaaaaagatattaagtttaataataaacaatcagcagaattcttacctaaaatttatcaaaatgaagacgctgatgctgttatcattaattcgaactttgcaatcgaacaaaaactaaatcctaaaaaagattctattgctgtagaaagtgcgaaagataatccttatgcaaacttaattgctgttaaagaaggacatcaagatgataagaaaatcaaagcattaattgaagtattacaatctaaagatattcaagacttcattaatgaaaaatacaatggtgcagttattcctgctaaataaatcatattaatggctcagtaacgtgatgttgctgggctttttaatttaaacaggtatttatatgatatttaggaatgagatgctattacggataaagtaaaatcctatatgcatgcgtgctactcatttattcttatttttaatttcacatggctagtgactaatacatcataaatcattagtgattctttattatttcagtcccactccctcaagttaatgatgaatctatttcgctagttataaaatgacgtcaaatcaatatcaaaaattatttaagtaaaatgtttagataatttttcagtgggtaagtattatatataacatttaattattccgaggaggcatttattatggcagacgaaagtaaatttgaacaagcaaaaggtaatgttaaagaaacagtaggtaatgttactgataataaaaatttagaaaacgaaggtaaagaagataaagcttctggtaaagcgaaagaattcgttgaaaatgcaaaagaaaaagcaactgattttattgataaagtaaaaggtaacaaaggcgagtaattttactttttattcctaatacactgcacatgccacttagtcggtataaccatcggctaggtggtttttgtattaaaaaagtggataccaaaatttattaataattattttaatgttagaaaaaaactaaataaaaactcgctaatgatatccaataatatgtatacaaaacgagacatatattgcatatgattaacgagatactgaaaatattttatcacccctaaaatgattattcattttcagcggtaattcgacctaaagtcaaacttacaataaaaccgatgataaatactactaatgaaacgaaccacatcacgatattagttggtaaacctggaaatactgcaaagagggagccaacaacaaaaccaatgattaatgcaaaagtcattagtttatgatgtgttaggaaatactggataattttgcttgaaataatgaatccagcaagcacgccaaatccgactgcaagtaatataggaagacctgcaaagttaagtttaacaacttcagatattgctagcatgaccgtaccatagacgccaaatactaataacataaatgaccctgaaatacctgggagtaacatagcactagatgcacacatacctgcaataaaatatttaataataagactagttgatagagtaagtgtttctccagcatgtttatcaccattattcattaatgtaataacaattaagatagcgataccagctataaccatcatgtaatgtttagttgtaaatgacgttttatagttagaaattttcaataaatatggaacgataccaatgattaatccaccaaagaaaaacatagttggaatatggtgttggcttaataaataattaaaaagattacttagtgatcccattgccagtaacattccaattataatggggattaaaaatgtaaaacttggccaaaaacgtcgtgagaatatgccgctaattgaagcgataaattgattgtaaatacctaacaataatgcgatagtcccaccgctaacaccaggtaccaagtcactcgttcccatagcaaaaccttttagaatattaatccatttaaattgttgcacgaataactcctttcaaacgattggaataaaatcataaatagcatcataccatattacaaatgtcctagtgaaatgataacatattttaaattcataaaatccattgagaaattatgtgcacttattatcatttatatttttaaagagagcggattagagttgtactttagagttattaaaaataataaaaagggtttaagttgtttatattaaggtataagtaagttataattaactgaacgcattattacaaagtctttttgactacaaattaaaattattataaactagttaagaaaactttatattttacggagggaatataaaatggcatcaacattagaaatcaaagacctacatgtgtctattgaggataaagaaatcttaaaaggtgttaacttgacaattaacactgatgaaatacatgcgattatgggaccaaacgggacaggtaaatcaactttatcatctgcaattatgggacacccaagctatgaagtaactaaaggagaagtacttttagacggtgtaaatattttagaattagaagttgatgaaagagcaaaagcaggattattcttggcaatgcaatatccatcagaaattacaggtgttacaaatgctgatttcatgcgttcagcaatcaatgcgaaacgtgaagaaggacaagaaatcaacttaatgcaatttattaagaaattagataaaaacatggattttctagacatagataaagacatggcacaacgttatttaaatgaaggtttctcaggtggagagaagaaacgtaacgaaatcttacaattaatgatgttagaacctaagtttgcaatcttagatgaaatcgattcagggttagacatcgatgcattaaaagttgtatctaaaggtattaaccaaatgcgtggggaaaactttggtgcattaatgattacacactatcaacgattattaaattacattactcctgataaagtacatgtaatgtatgctggtaaagtcgttaaatctggtggtccagaattagcaaaacgtcttgaagaagaaggatatgaatgggttaaagaagagttcggttcagctgaataatcttattaatacagtatccatgagatgttcatctatatatgatgaaaatgaacatttatacgaaatagtaaatttcatcaagtaggaggaaaaagttatgacaactgatattttgaacatttctgaagaacaacttgttgattattctaaagcccacaatgaaccttcttggatgacagaattacgtaaaaaagctttgaaattaacagaaactttagaaatgccaaaacctgataaaacaaaattaagaaaatgggattttgattcttttaaacaacacgatgtaaaaggtgatgtttatcaatctttatcacaattacctgagtcagtaagagaaattattgacgtagatcattctaaaaacttagtaattcaacataataatacgattgcgtacacacaagttgatgataatgcatcgaaagatggcgttatcgttgaaggtttagcagacgctcttatgaaccatagtgatttagtacaaaagtactttatgaaagatgcagtaacagtagatgaacatcgtatcacagcgctacacacggcattagttaatggtggcgtatttgtttatgttcctaaaaatgtagttgtagaacatccagtacaatacgttgtgttgcacgacgacgaaaatgcaagcttttataaccatgttatcatcgttactgaagaaagcgccgaagtcacatatgttgaaaattacttatcaaatgcatctggtgaaggaaatcaattaaatattatttctgaagtgattgctggtgcaaattcaaatatcacatatggctcagtggactatatggataaaggctttacaggtcatatcattcgacgtggtattactgaagcggatgcctcaattaattgggcactaggtttaatgaatgagggtagccaaattattgataatacaacaaatttatttggtgatcgttcaacaagttcacttaaatcagtagttgtaggtacaggcgaacaaaaaattaatctaacatctaaaatcgtacaatatggtaaagaaacagatggttatatccttaaacatggtgttatgaaagaacatgcatcgtctgtatttaatggtatcggctacattaagcatggtggaactaaatcaattgctaatcaggaatcacgtgtattaatgttatctgaacatgctcgtggtgacgcgaatcctattttattaattgatgaagatgatgtacaagctggtcatgctgcatcagtaggtcgtgttgatccagatcaactttactatttaatgagtcgtggtatttctcaaagagaagcggaacgtcttgttatacatggtttcttagatccagtagtacgtgaattacctatcgaagacgttaaacgtcaattgagagaagtaattgaacgcaaagtttctaaataatattttgaaaataaaagtttgtaatagatatagactgtcgatattggtataagactaatacaacgtcagtatttaaatgattaggatttttatttaagaaaggtcgtgaatgaagtggccgaacactcatttgacgttaatgaagtaatcaaggattttccgatattagatcaaaaagtcaatggcaaacgtttagcatatcttgattcaacagcgacaagtcaaacgcctgtgcaagtgttaaatgttttagaagattactacaagcgttataattcaaacgttcatcgtggtgttcatacattaggatcattggcaactgatggttatgaaaatgcccgtgaaaccgttcgtcgttttattaatgcgaagtattttgaagaaatcatttttacacgcggaacaactgcgtcgattaaccttgtagcacatagctatggtgatgcaaatgttgaagagggcgatgaaattgttgtcactgaaatggaacatcatgccaatattgttccttggcaacagttagcaaagcgtaaaaatgcgacattgaaatttataccaatgacagctgacggtgaattaaacatcgaggatattaagcaaacgattaatgataaaacaaagatcgttgctattgcacatatatctaatgtgctcggtacaattaatgatgttaaaaccattgcagaaatagctcatcaacatggtgcaattatcagtgttgatggggcgcaagcagcaccacatatgaaacttgatatgcaagaaatgaatgctgatttttatagttttagtggtcataaaatgcttggaccaacaggtattggcgtattatttggtaaacgtgagttactacaaaaaatggaaccgattgagttcggtggcgacatgattgattttgtaagtaagtatgatgcaacatgggctgatttacctactaaatttgaggcgggtactccattaattgctcaagcaattgggcttgcagaagctattcgctatttagaacgcataggttttgatgcaattcataaatatgaacaagaattaacgatatatgcttatgagcaaatgtctgcaattgaaggaattgaaatttatggcccgccaaaggatcgtcgtgcaggtgtaataacgtttaatttacaagatgtacatccacacgatgttgctacagccgtagatacagaaggtgtagcggttagagctgggcatcattgtgcgcaaccgttaatgaaatggttaaatgtgtcttcaacagctagagcgagtttttatatatacaacacgaaagaagacgttgatcagttaataaatgccttgaaacaaacgaaggagtttttctcttatgaattttaataatctagatcaattatatagatctgtcattatggatcattataaaaatcctagaaataaaggtgtattagataacgggtctatgacagtagatatgaataacccgacatgcggtgaccgtatacgactaacatttgatatagaagacggcattataaaagatgctaagtttgaaggtgaaggttgttcgatttcaatggcaagtgcatcgatgatgacacaagctgttaaaggtcattcacttggagaagcaatgcaaatgagccaagaatttacgaaaatgatgcttggtgaagactatgtgattacagaagaaatgggagatattgaagcattgcaaggtgtatctcaattcccagctcgtattaaatgtgccacattagcttggaaagcattggaaaaaggtactgttgctaaagaaggtaaagcagaaggtacgactgaagaagaatagaatgctgttaatcatagataattttgatattagacatataaaagtataaaaatttttataagatgtcatgtcattgttataatatggtttacatcatgaattaaaaacttacgcacgccgttgtaaatatatttttaaggagtgattgaaatggctaaaaaagcacctgatgttggggattataaatatggattccacgacgatgatgtgtccattttcagatcagaacgtggtttaactgagaatatcgttagagaaatttctaacatgaaaaatgagccggaatggatgttagatttccgtcttaaatcattaaaattgttttataaaatgccaatgcctcaatggggtggcgacttatcagaattgaatttcgatgacattacttactatgtaaagccttcagaacaagctgaacgttcatgggatgaagtgccagaagaaattaaaagaactttcgataaattaggaattcctgaagctgaacaaaaatatttagctggtgtttctgctcaatatgaatctgaagttgtttaccataatatggaaaaagaacttgaagaaaaaggtattatctttaaagatacagatagtgctttacaagaaaatgaagaattattcaaaaaatactttgcttctgtagtacctgcagcagataacaaatttgcggcgttaaactcagcagtatggtcaggtggttcgttcatttatgtacctaaaaatatcaaactagatacgccactacaagcttatttccgtattaactctgagaacatgggtcaatttgaacgtacattaatcattgctgatgaaggtgcttctgtacattacgtagaaggttgtactgcaccagtttatacaactagttctttacactctgctgttgtggaaatcattgtgcataaagatgcgcacgttcgttatactacgattcaaaactgggcgaacaatgtatacaatttagttacaaaacgtacttttgtttatgaaaacggaaatatggaatgggtagatggtaacttaggttctaagttaacgatgaaatatccaaactgtgttcttttaggtgaaggtgcaaaaggtagtacattatctattgcatttgctggtaaaggacaagttcaagatgccggtgctaaaatgattcataaagcacctaatacatcttctacaattgtttctaaatctatttctaaaaatggtggtaaagttatttatcgcggtattgttcattttggacgtaaagcaaaaggtgctcgttcaaatattgaatgtgatacattaatcttagataacgaatcaacatcagatacaattccatataacgaagtattcaacgatcaaatatcattagaacatgaagccaaggtttcaaaagtttctgaagaacaattattctatctaatgagtcgtggtatttctgaagaagaagcgacagaaatgattgttatgggattcatcgaaccatttacaaaagaacttccaatggaatacgcggtcgaaatgaaccgtttaatcaagttcgaaatggaaggtagtattggatagctttaaaccgcgttgttaagccattcttgacttccgaaaatggctattgataccattttgatactgaatataacaaaaagccacattactgtggctttttttgttttataactaaatcggattgatagataagctttgtacttatttatatcagttcgattttttgattggtgtaaaaaataatcattgatggtggataaagcgacaacacaaatacaacatgattgtggcattagagtgctggtctttattaaattaattgaaagctacatcaaatattctttagataattcgatattagttcgattaagattcgttgtataagtgagttaaaataagaaaactattaataatattaagttcactacagatgttgctaatggaccataagttttaaagacatcttcacttttataaccaacaatcgcatctaaaaattgaactaagatcattgcaatggatatagttatcaaaaatatagcactatgaatgactaaagaaaaaatagctaataaaaataaaggtaagcttcgactaagtgcataatatgcatttatattatggctagatgcacatgcttgaattgaataacctaaacttacactggcactgattattgtaaatattgctaaaacaaaatacatgttaatccttctttctatatttggatataaacaagtacttgtctaaagttatttaaaagataattagaataaatttatgagaaactggttgttatcattataatggtttcaaatgattataactatgtcataaactgaatttgttgaaatttttcattatgcaaatttattaataacaaacagctcgaactatagcatcattttactaatgaatgcattaaagtaactatgactaaaaatgcatattaattatcattattaagactattatatataatgaattttaactggtttattaaacgagaacgtcgggaattaagtaactacaataaaaataagatatgacaataaggagactacacgcgtgatcattgccataattatattgatatttatttcgtttttcttttcaggaagcgagacggcattaacggctgccaataaaacaaaatttaaaactgaagctgacaaaggtgataaaaaagcaaaaggcattgtaaagttacttgaaaaaccaagtgagtttattacaacgattctaattgggaataatgtcgcgaatattttattaccaacacttgttacaattatggctttacgttgggggattagcgttggtattgcatcagctgttttaacagttgttatcattttgatctccgaagtgattcccaagtctgtcgctgcaacatttccagataaaataacaaggcttgtatatccaattattaatatttgtgtcattgtgttccgtcctatcacattacttttaaataagttgacggacagtattaatcgaagtttatctaagggccaacctcaagaacatcaattttcaaaagaagaatttaaaacaatgttagcaattgctggacatgaaggtgctttaaatgaaattgagacgagtaggttggaaggtgtcattaattttgaaaatttaaaagtaaaagatgtagatacaacacctagaattaatgtgacggcatttgcttcaaatgcgacatacgaagaagtttatgaaacggttatgaataagccatacactagatatccagtgtacgagggagatattgataacattattggggtgtttcattctaaatatctgttggcttggagtaataaaaaagaaaatcaaattacaaactattcagctaagccattatttgtgaatgaacacaataaagctgaatgggtattacgtaagatgactatttctagaaaacatttagcaattgtgttggacgaatttggtggtactgaagcgatagtgtcacatgaagacttaattgaagaattattaggtatggaaattgaagatgagatggataaaaaggaaaaagaaaaactttctcaacagcaaattcaatttcaacaacggaaaaatcgcaacgtatctatataaggagcgaacagctatgtggaataagaatcgacttactcaaatgttaagtattgaatatccaattatacaagcaggtatggcaggaagtacgacaccgaaattagttgcatcagtaagtaacagtggtgggttaggcacaataggcgcaggttactttaatacgcagcaattggaagatgaaatagattatgtacgccaattaacgtcaaattcttttggcgtaaatgtctttgtaccaagtcaacaatcatataccagtagtcaaattgaaaatatgaatgcatggttaaaaccttatcgacgcgcattacatttagaagagccggttgtaaaaattaccgaagaacaacaatttaagtgtcatattgatacgataattaaaaagcaagtgcctgtatgttgttttacttttggaattccaagcgaacagattataagcaggttgaaagcagcgaatgtcaaacttataggtacagcaacaagtgttgatgaagctattgcgaatgaaaaagcgggtatggatgctatcgttgctcaaggtagtgaagcaggtggacatcgtggttcatttttaaaacctaaaaatcaattacctatggttggaacaatatctttagtgccacaaattgtagatgtcgtttcaattccggtcattgccgctggtggaattatggatggtagaggagttttggcaagtattgtcttaggtgcagaaggggtacaaatgggcaccgcatttttaacatcacaagacagtaatgcatcagaactactgcgagatgcaattataaatagtaaagaaacagatacagtcattacaaaagcgtttagtggaaagcttgcacgcggtatcaacaataggtttatcgaagaaatgtcccaatacgaaggcgatatcccagattatccaatacaaaatgagctaacaagtagcataagaaaagccgcagcaaacatcggcgacaaagagttaatacatatgtggagtggacaaagcccgcgactagcaacaacgcatcccgccaacaccatcatgtccaatataatcaatcaaattaatcaaatcatgcaatataaataatcgaccgcaatccacaaaagcacaagcacccccaaacattattttagtgcttgccatttttgtggattgcgtttctattttaccaatttaatcaaacgaaaacatcaagctgaagatcgccgaaagattttaatcaagcaaaaacatcaaactaaagttcgctgaaatgattatgataaaagttatatggtatgatgacattggtgatatatatgataaacatcggattaacaggttggggtgatcactattcattatatgaagatttagaacgccaaaccgataaacttaaaacatatgctggacattttccggttgtcgaattagatgcgacatactatgcgatacaaccggaaagaaatatattgaaatggataaaagaaacgcctgatacatttgaatttgtggtcaaaattcatcaagcactcacattgcatgcagactacaaaacatttgcagatacaaggcaagaactatttgatcaatttaagaatatgttagagcccttacatacacagaaaaaattagcaatggtattggttcaatttccgccatggtttgactgcaatgcacaaaatatcaaatatattttgtatgtaagacagcaattacaagcatttccaatgtgtgtagaatttaggcatcaatcatggtttagtgatgcatttaaagaacaaacattggcatttttaacagaacatcaaatcattcatgcagtagttgatgaaccacaagtgaaagatggcagtgtacctttagtcaatcgaatcacaaatgaaattgcgtttgtacgttatcatggacgtaatcattacggttggactaagaaagatatgtcagatcaagaatggcgcgatgtacgctatttatatgattataatgagcaagaattaatagacttggcacaaaaggcacaaatattagcacaaaaagctaagaaagtttacgtcatatttaacaataattctggtggtcatgcagcaaataatgccaaaacatatcagcgattattgaatatagaatatgaagggttagcaccacaacaattaaaattattttaagaggcgacgactatgttattaacaattacattattagttttaatcggaggtttgtcagcgattatagggtctatcgtaggcattggaggcggtattattatcgttccaacaatggtttacctcggtgttgaacatggattactacataatattacaacacaagtagcgatagggacgtcttcagtcattctaattgtgacaggactttcttcatcacttggatatttaaaaacaaaacaagttgatattaaaaatggttccatctttttatttggactattaccaggttcattgcttgggtccttcattagtagatatttaacatttgagtcatttaatttatattttggtatctttttaattttcgtagccattttattaatggtaagaaataagattaaaccgtttaaaattttcgataaacccaagtatgaaaagacttatgtagacgctaaaggtaaaacatatcattatagtgttccaccattgtttgcttttatttcaacgtttttaattggtatattgacaggtttatttggtattggaggtggcgcactaatgacgccactaatgcttattgtatttagatttccacctcatgtagctgttggaacaagtatgatgatgattttcttttcaagtgtcatgagttctatagggcacattgctcaaggtcacgtagcttggggttatgcaatcattttaattatttctagttattttggtgcgaaaatcggtgtcaaagtgaatcaatcaattaagtcagatacggtagtaacattattgagaacagtaatgttgttaatgggtatatatttaattattcgtgcgttgatttaatacaactttaaaaggaggacgtcaatttgaggcttacaatttatcatacgaacgatattcatagtcatttacatgaatacgaacgcattaaagcatatatggcagaacatcggccacgacttaatcatccttctttatatgttgatctaggtgatcatgtagatttatccgcacctataactgaagcaactttaggtaaaaagaatgtggcattactaaatgaagcaaaatgtgatgttgcaacaatcggtaataatgaagggatgaccatttcatacgaagctttaaatcacctttacgacgaagcaaaatttatagtgacatgtagcaatgttatagatgaatcaggtcatttaccaaataatatcgtttcttcttatattaaggacatagacggtgtgaaaatactattcgttgcagcgacagcaccttttaccccattttatcgtgcactaaattggattgttaccgatccacttgaatctataaaagaagaaattgaacttcaacgaggtaaatttgatgtattaatcgtgctaagtcattgtggcattttcttcgatgaaacattatgccaagaattgcctgaaattgatgtcatttttggtagtcatacgcatcattattttgaacatggtgaaatcaataatggtgtactgatggcggcagctggaaagtatggtaattatcttggagaggttaatttaacttttgaggcacataaagtagtacataaaactgcaaagattattcctttagaaacattacctgaagttgaaacttcatttgaagaagaaggaaaaacgttaatgtccaattcagtaattcaacatccagtagtgcttaagcgtagtatgaatcacataactgaagctgcatacttattagctcaaagtgtttgtgagtatacacatgcacaatgtgccatcatcaatgctggcttactcgttaaagatattgtaaaagatgaagtgacagaatatgacattcatcaaatgttaccgcatccgattaatatggtaagggttagactttttggtgtgaaattaaaagagattatagctaaaagtaataaacaagaatatatgtatgaacatgcacaaggtttgggtttcagagggaatatatttggaggatatattctttataatttagggtacattcattctacagggcgttactatctgaatggagaagaaatcgaagacgacaaagaatatgtactaggtacgatagatatgtatacgttcggtcgttatttcccaacattgaaagaattaccaaaagagtatttaatgccagagtttttaagagatatatttaaagaaaaattattggaatattaaaaagtaagattattggattttcatttgtcatgaatttcgatataatgtttaaagatacacttaacaggagggtatgtgttgttatggcgacaaaaaacgaggaaatattacgtaaaccggattggttgaaaataaaattaaataccaacgaaaactatacaggacttaagaagatgatgagggaaaaaaatcttaatactgtatgtgaagaagctaaatgtcctaatatacatgaatgttggggtgcacgtcgtacagcgacatttatgattttaggtgccgtatgtacaagagcttgtcgtttttgtgcggttaagacaggtttacctaatgaacttgatttaaatgagcctgaacgtgtagctgaatcagttgaattaatgaatttgaaacacgttgttatcactgctgttgcgcgtgatgatttaagagatgctggttcaaatgtttatgctgagacagtacgtaaagttagagaaagaaatccatttacaacgattgaaattttaccatcagatatgggcggggactatgatgcgttagaaacattaatggcgtcaagacctgacattttaaaccataatattgaaactgttcgtcgcttaacaccgagagttcgtgcgcgtgcgacttacgacagaacattagagtttttacgtcgttcaaaagaattacaaccggatatcccaactaaatcaagtattatggttggattaggtgaaactatagaagaaatttatgaaacgatggatgatttacgtgcgaatgatgtagatattttaacgattggtcaatatttacaaccttcacgtaaacatttaaaggttcaaaaatattacacgcctttagagtttggtaaattaagaaaagtggcaatggataaagggtttaaacattgccaagctggacctttagtacgtagttcttatcatgcggatgagcaagtaaatgaagctgctaaagaaaagcaacgccaaggtgaggcacagttaaatagttaatatttaaccattaataaggcataaaggcttagtttgtacaaaacgaacgtgtcatagaagtaatcattatttttatgaaacactaaaagtataaactgagcctttcattgtcatagataggtgaagaatttgataaaagtagatcaacattactttgaattaatagaaaattatcgcgaatgttttaatgaagaacaatttattgctaggtattcagatattttagataaatatgattacatagttggtgactatggttacgatcaattacgattaaaaggtttttacaaagattctaataaaaaagcagagatgagtaaacgtttttcaaatattcaagattacatatttgaatattgtaactttggttgtccttactttgtattaagacatttgtctaaacaagaggttaaaaagttaatcgaagaagttcatccgtctgatgtgatagatgacgacaataaacttcaagatgtgaagattaagccaaccattcaagatactgaacattaataaaacccttagctagattgaaaatgggaatcatgcaattcaagcatggacctgtaatctagttaggggtttttatctttaatgaatgacttcatttaaatactcagtaatttcatcgccttcttcagcatttacacctaaaatatgagcgatatagccttcttcttttaaatcatcagtaccgataataccgaatttatttgtttgcatattaagtacgagtgtcttaccataatgtctatttgtatggactaacatcaaatcatatcgactatgctcgccaacaaaaccaacaaactgaacttgactctcttcgttgtcatcatataaatacatatcaatcattttgtagcgactccttttaaaagtagtaaagttagtataacgacaaatgaagtatactgcaaaattatgataatatataagtgagaggtgacaaggaatgtattttgtagacaaagataaactaactcagaaattagcctatttacaagcattaactgatgattatcatgagagcaagcacaatcattatgcatttgaacgcattgctcaaatgttgatagaatcatcggtagatatagggaatatgattatcgatgcatttattttaagggatcctggtaattataaagatgtgattgatatattagaactagaaaatgttattactaaagaaacacagcaggcgattaataaaactgtcggtattcgtaaacaatttacatatgattacacagccttagatattaagattatcatgccaatgtttgatgacgcattaccttattacaaacaatttattacagaagtaacgatatttttacatcaagaaaatgtaccagtaacagcttttggtaaaggagaaaatcaataatgaaacagtataaagcgtatttaatcgatttagatggcacaatgtatatgggaacagatgagattgatggagcaaaacaattcatcgattatttaaatgtaaaaggcattcctcatttatacgtaactaataattcaacaaaaacacctgagcaagtaactgaaaaattacgtgaaatgcacattgatgctaaaccagaagaggttgtaacgtcagcgttagccactgctgattatatttcagaacaatcaccaggagcatcagtatatatgttaggtgggagtggtttaaatactgcgttaaccgaagcgggacttgtcattaaaaatgacgagcatgttgattatgtagttattggacttgacgaacaagttacatatgaaaagcttgcgattgcaacgttaggtgtaagaaatggtgcaacatttatttctacaaatcctgatgtatcaattcctaaagagcgtggtttattacctggtaatggtgctattacaagtgttgtaagtgtatcgacaggtgtatcgccacaatttattggtaaaccagaaccgattattatggttaaagcattagaaattttaggattagataaatccgaagttgctatggtaggcgatttgtacgataccgatattatgtctggtattaacgtaggtatggatacgattcatgtacaaacaggtgtatctacgttagaagatgtgcaaaataaaaatgtgccaccaacgtattcttttaaagatttaaatgaagcaatagctgaattagaaaaatagatatagtcattttataaagtaggtgaattgatttggtaaaaatagttgtttcgaggaaaattccagataaattttatcaacaattaagtaaacttggtgacgttgttatgtggcaaaaatcattagtgcctatgcctaaagatcaatttgtgacagcacttcgtgacgcagatgcttgttttattacattaagtgaacagatcgatgcagaaattttagcgcaatcaccaaatttaaaagtaattgcgaatatggctgtaggatatgacaacatcgatgttgaaagtgcaacagcgaataacgtggttgtcacgaatacaccaaatgtacttactgaaacaactgcagaattaggatttacattaatgcttgctatagcacgccgtattgtagaagctgaaaaatatgtagaagcagatgcatggcaaagctggggtccttatttattgtcaggtaaagatgtcttcaattcaactattggaatatatggtatgggagatattggtaaagcttttgcaagaaggttgcaagggtttaatactaatattctttatcataatcgatcaagacataaagatgcagaggcggactttaatgcaacatatgtttcttttgaaacgttgttagcagaaagtgattttatcatctgtacagcgccacttacaaaagaaacacatcataaatttaatgctgaagcatttgaacaaatgaaaaatgatgcaatttttattaatatcggtagaggacaaattgtagatgaaacagcattaatcgatgcactagacaataaagaaattttagcatgtggtttagatgtattagcaaatgaaccgattgatcatacacatccattaatgggacgtgataatgttctgattacaccacacattggtagcgcatcagtaacaacacgggacaatatgattcaattatgtattaataatatagaagcggttatgacaaatcaggtaccacatactccagtaaattgaaaataagtatggtttttaatcattggtaaaacaagcaaagcaattgttaaatatgttatgcttgacttgcgaatgtatatatttgcgctgatgataattcaataacattataaactcgtcatattaatgtgatgagtttatttgattttgacgtatataacaaaattgttatatagactgtaattgtttattgtttaaataacctttaaaatgaatgatgttctcaacaaagtgtatcatttacaataattgagtgatgacaaccaattactatgttgaatctataaaattaaaattgaatttcattatgaatatcgatataatgaattgtaaaaaacaaattttaaaacgtattttatattgaacggtctttataaaggcgtttttactaagaactttaagaggtgcaatatgaaatctaaaagtaaacagccacctaataaatatgttgaagcattcaaaccatatttattaacactattgtatttggcaatatttattactttatatttaatttatggcagtggcgacacacacaataacttcatttataatgagttctaatgagggagacttaatatgacagatattattaacaagctgcaagcgtttgcggatgcaaatccacaaagcattgctgttagacacacaactgatgaattaacttatcaacagttaatggatgagtctagtaaattagcacatcgattacaaggtagtaagaaaccgatgattttattcggtcacatgtcaccatatatgattgttgggatgattggtgccattaaagcaggatgtggatatgtacctgtagacacttcaattcctgaagaccgtattaaaatgattattaacaaggttcaaccagagtttgtatttaatacgactgatgaatcatttgaaagtttagaaggcgaagtatttacaatagaagatattaaaacatctcaagacccagtaatttttgatagtcagattaaagataacgacacagtatacacaatctttacatctggttctactggggaacctaaaggtgttcaaattgaatatgcaagtttagttcaatttactgagtggatgttagaacttaataaatcaggaaatgaacaacaatggcttaaccaagcgccattttcatttgatttatctgtaatggctatttatccatgtttagcatcaggcggtacattaaatcttgtagataaaaacatgattaataaacctaaattattaaatgaaatgctaacagcaacaccgattaacatttgggtatcaacaccatcatttatggaaatgtgtttattattaccaacgcttaatgaagaacaatatggtagtcttaacgaattcttcttctgtggtgaaattctacctcacagagcagcaaaagcgttagtaaaccgtttcccaagtgcgacgatttacaacacatatggtccaactgaagctacggtagcagttacaagtattcaaattacacaagaaatcttagatcaatatccgacattacctgttggcgttgaaagaccaggcgcaagattatctactacagatgaaggtgaacttgttatcgaaggtcaaagtgtaagtttaggatacttaaaaaatgaccaaaaaacagctgaagtatttaatttcgatgacggtattcgtacatatcacactggtgataaagcgaagtttgaaaatggtcaatggttcattcaaggtcgtattgatttccaaatcaaattgaatggctacagaatggaattagaagaaattgaaacacaattacgccagtctgagttcgtaaaagaagcgattgttgtacctgtatataaaaatgataaagttattcatttaattggtgcaattgtgccaacgactgaagttacggacaatgcagaaatgactaaaaatattaaaaatgacttgaaatcacgcttaccagagtatatgattcctagaaagtttgaatggatggaacaattgccattgacttcaaatggtaaaattgacagaaagaaaattgcagaggtaattaacggatgattccatatggtgattttacattcttcttaattgctttaattgcattattaccagtcattatacttggatttttaggtaagcgaagttacatttataatggcgtagttacagcatttatgattgtgttaatcttttcttctgataaacataatctgtttgaccaaaagtatttaagtgttcaattaattagttttattatttacgtcgtatggcaagttttattgataatgttttattatcattcaaaaccaaaaaataattcattttcaaaatttgtaactgtaatggttttatcaatattgccattagcacttgtgaaagtgttacaaagtacatggttaggtggacatcagattcacttccatgaaagtaaattaattgaatttgttggtttcttaggaatttcttatgttacattcaaaagtgtgcagttaattatggaaattcgtgatggttctatcaaagaaattaaagtatggaaattaattcaatttatttcattcttcccaacgatttcatctggaccaatcgatcgttacaaacgtttcgttaaagacgataaaaaagtaccaacaggcaatgaatatcgtgaattagtattaaaagcaattcacatgattatgcttggtttcttgtataaatatattgttgcttactttattaacacatatgcaatcatgccgttacaattagacttacatggctttgtcaatttgtggttatatatgtacgcatacagcttatatttattctttgactttgcaggttatagtttatttgcgatagcatttagttatttattcggtattaaaacaccaccaaacttcgataaacctttcaaagcgaaaaatattaaagatttctggaatagatggcatatgacattatcattctggttcagagattgtatttacatgagatctttattctacatgtctcgtaaaaaattattgaagagtcaatttgcaatgtctaacgtggcattcttaatcaacttcttcataatgggaatttggcatggtatcgaagtgtattacattgtttatggtttataccatgcagcattgtttataggttatggctattatgaacgttggcgtaagaaacatccgccacgttggcaaaatggtttcacaacagcacttagcattgtgattacattccactttgtaacatttggctttttaatcttctcaggtaaacttatataataaaggagaatttaattatggaatttagagaacaagtattaaatttattagcagaagtagcagaaaatgatattgtaaaagaaaatccagacgtagaaatttttgaagaaggtattattgattctttccaaacagttggattattattagagattcaaaataaacttgatatcgaagtatctattatggactttgatagagatgagtgggcaacaccaaataaaatcgttgaagcattagaagagttacgatgaaattaaaaccttttttacccattttaattagtggagcggtattcattgtctttctattattacctgctagttggtttacaggattagtaaatgaaaagactgtagaagataatagaacttcattgacagatcaagtactaaaaggcacactcattcaagataagttatacgaatcaaacaagtattatcctatatacggctctagtgaattaggtaaagatgacccatttaatcctgcaattgcattaaataagcataacgccaacaaaaaagcattcttattaggtgctggtggttctacagacttaattaacgcagttgaacttgcatcacagtatgataaattaaaaggtaagaaattaacatttattatttcaccacaatggtttacaaaccatggtttaacgaatcaaaactttgatgctcgtatgtctcaaactcaaattaatcaaatgttccagcagaaaaacatgtctactgaattaaaacgtcgttatgcacaacgtttattacagtttccacatgtacacaataaagaatacttgaaatcttatgctaaaaaccctaaagaaactaaagatagttatatttctggttttaaagagaatcaattgattaaaatagaagcgattaaatcattgtttgcaatggataaatctccattagaacatgttaaacctgctacaaaaccagacgcttcttgggatgagatgaaacaaaaagcagttgaaattggtaaagctgatactacatcgaataaatttggtattagagatcaatactggaaattaattcaagaaagtaagcgtaaagttagacgtgactacgaattcaatgttaattctccagaattccaagatttagaattacttgtaaaaacaatgcgtgctgctggtgcagatgttcaatatgtaagtattccatcaaacggtgtatggtatgaccacattggtatcgataaagaacgtcgtcaagcagtttataaaaaaatccattctactgttgtagataatggtggtaaaatttacgatatgactgataaagattatgaaaaatatgttatcagtgatgccgtacacatcggttggaaaggttgggtttatatggatgagcaaattgcgaaacatatgaaaggtgaaccacaacctgaagtagataaacctaaaaattaaaatacaaatagcacataactcaacgattttgattgagcgtatgtgctatttttatattttaaatttcatagaatagaatagtaatatgtgcttggatatgtggcaataataaaataattaatcagataaatagtataaaataactttcccatcagtccaatttgacagcgaaaaaagacaggtaataactgattataaataattcagtattcctgtctttgttgttattcataatatgttctgttaacttaatatctttatattagaatacttgttctacttctattacaccaggcacttcttcgtgtaatgcacgctcaataccagctttaagagtgattgtagaacttgggcatgtaccacatgcaccatgtaattgtaatttaacaataccgtcttccacgtcaatcaatgagcagtcgccaccatcacgtaataaaaatggacgaagacgttcaataacttctgctacttgatcaaacatcgttgtatcttcagtaggcatcaggcaagtctcctttcgagagatgaatttgataatctttattagtatattataatagatagtgtaataaaaatctatcaaaccaatgggggataaatatatggagcacgtgagtgtggtagtttatggggcagatgttatatgtgcaagttgcgttaatgcgccaacatcgaaagatatttatgactggctacagccgctattaaaaagaaaatacccaaatatatcatttaaatatacgtatatagatattacaaaagataatgacaacttaacagatcatgatttacaatttattgaaagaatagaacaagatgaactattttatccattaattacaatgaacgatgaatatgtagcagatggttatatacaaacaaagcaaatcactcgatttatagaccaaaagcttgtgaatgaataatatacacataactaaaagcaatgtcagtaatagtgtgaactgacattgctttttaattttaaccattatgatatttatataaccaaagtacgccggattttaaaatagaagcgagtcgtcctgttacagtgcggtccatgatatatgcaaaaccttgcttatctcctaatgacccaacgataccttgtacctttagttccggcattttgtcaggtaatggttcatttagccattgctttttaagcacatcggcaatttgatcaccttgaacttcggctaactgagcacttggcgcatgtggtaaatcagcacaatcaccaactacatagacgttacgatatgttggtacttgatgatactggttaactatcacgcgtccattactatttatatcaatcggcaagttacgaacaacttcaacaggttgaattcctgctgtccatacaactaaatcaatatctttaggttcatcacagttatatattttaccaggttcaactttattaatatttgaatttggaacaacggtaacattatttttggcgaaccatttcgcaacatacttacttaatttttctggaaaatttcttaaaattcgcggcccacggtcataaagatatatttccaagtctgatctactttctcttaattcgctggcaagttctatgccgcttaatccagcaccaacgataccgactttagcaccttctggtagttcactaatactatggaaagtatcccgagcctttgagagtgtttgaatactatgtgtatattcttcggctcctggaacgttatgatatttatcttcacatcctaaaccaatgattagctcatcataatcaattttagaattaccgactgagacaatttgagcatctaaatctatgtcgttaatttcaccataaactgtattcacttgtggatgattagggaatttcatacgaacatctttatctgatttcgtgcccgcagctaaagcataaaattctggtttcaatccatgaaatggcatacgatcaactaatgtgactgtataatcttgtggtaaagaagtagttaaaatgcgtgacatgatacgcatattaccatatccgccgcctaacaaaactaagtttttcataatgaagtaccccttttatatgttaatatttactttaattttgaaaagatcaaagtgcatagatatatttgttaatgaacagttataaaatgcaagtgtctttgattcatcaataacccctaaaaaagtaaatatgtatttatatgcttattatatatttttttgaaaatgactacaaataaatatttgtactaactaaggcactattacataactgggataagaaacatcagttgttgctaattgagcacatcatgttaaaataccagttttaaaatgctataatattgtaacaaatgaaataagaaggtgaagtatgaatccgatcgtagaattttgtctctctaacatggcaaaaggtggagattatgtttttaatcaactggaaaatgacccagatgtcgatgtgttagagtatggttgcctgacacattgtggtatatgttcagccgggttgtatgctttagtaaatggtgatattgttgaaggtgattcgccggaagaattattacaaaatatatatgcacatataaaagaaacttggattttttaaggaggagttatcatgccaacagttatattaacagaagcagctgcttacgaagtaaaagatatgcttaaagcaaatgaaatgccagatggctatttaaaaattaaagtgaatggtggcgggtgcactggtttaacatacggtatgggtgcagaagaagcgcctggtgaaaatgatgaagtcttagaatactttggattaaaagtattagtagacaaaaaagatgcacccgtattaaatggtacgactattgattttaagcaatcattaatgggtggcggtttccaaatcgacaatcctaatgcaattgcttcatgtggctgtggtagttcatttagaactgcaaaagttgcaggtaatcctgaaaattgctaataaaataactttttaatggttaacccaatttttgggatacaaattgatatcaataacgattaaggacatatttgattatgtcctatttttgcgtaaagatattttgttttattaaaaagcttattgaaaattaagaatctgactataaatagtattttaaatgatcgtgatagcggatacatttttaatcgaaatcaggctacgaaaaaattaattaattttttcacaatctgactgaatcttgcttgaaaatataacataaaagctatagaattagtattggattaaaaatgtcttttttgtgaacatcacaggtttttacataatttaaaagacttaaataacaaaatgatgataaactagtatacattgtggtaaaagtagtaatgaccagttgttactagtaattatcagcatttggttaaaaaaatatgaaagcttaggtgaaattaaatggctcaagatcgtaaaaaagtacttgtacttggtgctggttatgcaggtttacaaactgtaactaaattgcaaaaagcgatatcaacagaagaagcagaaattacgcttattaataaaaatgaatatcactatgaagcaacatggttacatgaagcatcagcaggtacactaaactatgaagatgtattatatcctgtggaaagtgtcttgaagaaagacaaagtgaactttgttcaagcagaagtaacaaaaattgaccgtgatgctaaaaaggtagaaacaaatcaaggtatttatgactttgatattttagtagtagcattaggtttcgttagtgaaacattcggcatcgaaggtatgaaagatcatgctttccaaattgaaaatgttatcacagcacgtgaattatcacgtcatatcgaagacaaatttgctaactatgcagcatcaaaagaaaaagatgataacgatttatctatcttagttggtggtgctggattcactggtgttgaattcttaggtgaattaacagacagaattcctgaattatgtagcaaatatggtgtggatcaaaataaagttaaaatcacttgtgttgaagcagcacctaaaatgttaccaatgttctcagaagaattagttaaccacgcagttagctacttagaagaccgcggtgttgaatttaaaattgctacaccaatcgttgcttgtaacgaaaaaggttttgtagttgaagtagatggtgaaaaacaacaattaaatgcaggtacttcagtatgggcagctggtgtacgtggtagtaaattaatggaagaatcatttgaaggcgttaaacgtggacgtatcgttacaaagcaagatttaacaatcaatggttacgacaacatttttgttattggtgactgttcagcgtttatcccagctggagaagaacgtccattaccaactacagcacaaattgcaatgcaacaaggtgaaagtgttgctaaaaacattaaacgcatcttaaacggtgaatcaactgaagaattcgaatacgttgatcgtggaactgtttgttctttaggttcacatgacggtgtaggtatggtatttggtaaacctatcgctggtaaaaaagcagcattcatgaaaaaagtgattgatacacgtgcggtattcaaaatcggtggtatcggtttagcattcaaaaaaggtaaattctaggctttaaataaagtttcagctaaacacataaaattaaattattcatttataaagtccttcagtgtcactgaagggctttattgttgtacaatttgaagtgagtaacatatcaaatctaaggaggtacattatgaattttaaattaaataacacactaagcaacgaaataaatacattgattattggtataccagaacatttaaatcagttagagcgcattagttttaatcatatcgatattacagaatcacttgaaagactaaaacatcaacatattattggtagtaaagttgggaagatttatacaactgcatttgatgtacaagatcaaacatatcgtttaattacagttggtttaggaaacttaaagacacgtagttatcaagatatgttgaaaatatggggacatcttttccaatacataaagtcagaacacattgaagatacgtatttacttatggattcatttatttcaaaatatgatcagttatcagatgtattaatggcatgcggtattcaaagtgagcgtgcaacatatgaattcgatcattataaatcaagtaagaaggcaccgtttaagacgaatttaaaccttattagtgaatcattaattgaattagattttattcatgagggtatcagtattggccaatccattaatttggcaagagactttagtaatatgccaccgaatgtattaacaccacaaacatttgcagaagatattgttaatcattttaaaaatacaaaggtcaaagtagatgttaaagattatgacactttagtttctgaaggattcggacttttacaagcagtaggtaaaggtagtaagcataaaccgagattagtaaccatcacatataatggcaaagacaaagatgaagcaccaattgccttagttggtaaaggtataacgtatgattctggtggttatagtattaaaacgaagaatggcatggctacaatgaagtttgacatgtgtggcgctgcgaatgtcgttggtatcattgaagcggctagtcgtttacaactgcctgtaaatattgtcggagtgcttgcgtgtgctgaaaatatgataaatgaagcatcaatgaagccagatgatgtatttacagcattaagtggtgaaactgtagaagtaatgaatacagacgctgaaggtagattagtccttgcagatgctgtgttttatgcaaatcaatatcagcctagtgtgattatggactttgctacattaacgggtgcagcaattgttgcactaggcgatgataaagctgctgcatttgaatcgaatagtaaagtgatattaaacgatatattacaaataagttctgaagtcgatgaaatggtatttgaattaccgattactgcaaccgaacgtgcaagtattaaacacagtgatatcgctgatttagttaaccatacgaatggacaaggtaaagcgctatttgcggcaagttttgtaacacattttagtggtcaaacacctcacattcatttcgatattgcaggtccagcaacgactaataaagcttcatataatggtccaaaagggccaacaggatttatgattccgacgatagtacaatggttaaaacaacaataatttaattatttgcctgatacaacttgtgtcttgatatacatttctaatttaactcttgaaagtataaaggatcgcattgtatcaggcattttcattgttgtaagaaaatataaatcgcatatccttgtgagcataaatcaacttgactagcattgcaaaaaaatattataagcatatgttcattcagtcaacgactactaatattgcattttagaacttaggattttgattggtgttccaagcttgtaaaattgtttaatttaatgaaagctaaaattattttaagaaagacaattaactaaaaaataaagattattggtatagtttgctattgacaggtgttaaagctactgatactatgtagtctataaacgctttagttcgatagagtgataaaggatggttgtcatatgataaatgcagtagtaatagcagtaattttaatgattgtgctatgtttatgtcgattaaacgtagttataagcttatttatcagtgcgctagttggtggcttaatttcaggcatgagcattgaaaaagttataaatgtatttgggaaaaatatagtcgatggtgctgaggtagcattaagctatgctttattaggtggatttgcagcattaatttcatacagtggtatcacagactatttagtaggaaaaattataaatgcaattcacgctgaaaatagtcgatggtcaagagttaaagtcaaagtgacaataatcattgcattattagctatgagtatcatgagtcaaaacttaattcctgtacatattgcattcattccaattgtcatcccaccattgttaagtctgtttaatgacttaaaaatagatagacgtttaatcggtttgattatcggttttggtttatgtttcccgtatgtgttattaccatatggattcggtcaaattttccagcaaattattcaaagtggctttgcaaaggcaaatcacccaattgagtttaatatgatttggaaagcaatgcttattccttcaatggggtatattgttggcttacttatcggtttatatgtatatcgtaaaccacgtgaatatgaaacacgtaaaatttcagatagtgacaatgttacagagttaaaaccatatatcttaatagtaacaattgtagcaatactagctacatttttagtacaaacatttacagattcaatgatttttggtgcactggcaggggtactcgtattctttatttcacgtgcatataattggtatgaattagatgctaagtttgttgaaggtattaaaattatggcttatattggtgtagttattttaacagcaaatggatttgctggtgtaatgaatgctactggtgatatagatgaattagttaaaactttaacaagtattactggtgataataaattatttagcattatcatgatgtatgtgataggtttaattgtcactttaggtattggatcatcatttgcaacaattcctattatcgcatcattattcattccttttggagcgtcaattggactagatacaatggcattaatcgcattgattggaacagcgagtgcattaggtgactcaggttcgcctgcaagtgattcaacattaggaccaactgcgggattaaatgttgatggccaacatgatcatatacgtgatacatgtgtaccaaacttcttgttttataatattcctttaatgattttcggtactattgctgctatggtactataagcataaagaggtgaaaatatgactcatttattagagacatttgagatgtcaatagatcaccaggaagatggtttagttgttatttctatgcctgttactgataaagtaaaacaaccatttggatatttacatggtggggcttcgattgctttaggtgaaacagcatgttcattaggatctgctaatttaattgatacaaccaaatttattccattaggtttagagatgaatgctaaccatattcattctgctaaagatggtcgtgttactgcgacagctgaaattattcatcgaggtaagtcgacacatgtatgggatataaaaattaagaatgacaaagaacaattaattacagttatgcgtggtacagttgctattaaacctttaaaataaaagaactgctagctgaaatgttatgagatattcataactacggctagcagtttttttatgcgctatattgttgtagttttagaaatgcttgttcaatgcgttcggcagctttacggccacccataacatttctaccaaatggtcctaattctaagtctgcaaagcatcctgcgacaaatagatttggtatccattctaatttttcggaaataacagggtaattacattcgttgataggtgcatcataattttgtattaattgcttaataagtggttgtgacataaaatcttgttcaaaaccagttgcaaccataatctgttgatatggaacagaatcattttcagtgttaattacaccaccactaatttgagtgataggtgttttatgcacatttatacgaccatttttaatatgttttttaaggcgtaagtacagttcgtgaggcattgatcctttatgacgttcgcgttgtacaatggcatttctttcaggcatgcttttagtacttaaaaatgaagacatatttttcggacctaaccaaccaggatcagcatcaaagtcatgtatttcaatatctttatttagccataaatgaatctttttatcgttatcatgatttaacaatttaagtgcaagatgtgcagcagtaatgccgctaccaacgatatgatcggtcttatcatatactacttgatcaagttctttctcgaagatatgatttacattctgtttgtcttttaaaatgtcaggcataaacggaatatttgtactgcctattgcaataacgacgcaatctgtagtgataatttgtccatcttctaacttgatatgccatttgtcttcttgtttatctaaagtttgaactaaaccttgaaccaagcaatcctctaattgatattgtttagaagcatgtgcaatatgatccataaacattgtcaattcaggtcgttgataaggaccataaaaagcatttgtatattggtgctgtttagcgaattgttttagatggaacggttgtggatgtacgtgatgtacaatcggtgatcttaaataaggcatttctattcgatttgtatatgagttaaacctttggcaaaaagtttcgtgtgggtcaatgattgttaatcggtctgttgttaatccgcttgataatagtttttgtgcgattgcagttccctgtatgccaccgccgataattgtccaatgcataataaaacctctctctttttaaaacgtaatagttacgatttataattattattatcataatacataacgacatgaaaggcaattaaattaaagagatatatgtagatagggcgaatctgtagtcaaagaaaaaatcattgaaaaagaggtaacaatgtcaaaagaaaacagcagtaaaatcattcctaatttggaatcatcttactgctgtttgttgttgatttatattcatgattttgttatataatctacaattttgtgtcttttaagtcttccgaaatttcatcgactttagtctttttagtataaggcgttttaatattatatgctgctttcataatcatatgacttgaaagaggacctgtaattaatacaaagataatcgcaacgattaattgcatatttacaaaaccttgagtagcaataaaatataaaaacgtaccaaatagtaatgacattgcacctaatgttgatgcttttccggcagcatgtgcacgtgaatatacatcttcaagtctcaataatcctatagctgctagggcgctaattaaagcaccgatgataacaaagataagtgcaagactaatcagtatgattttgatcatgttcaatcaccttacctttgtccataaatttagagaatactgcagtacctaaaaaagctaatataccaatcatcataataacgacaatcatgtatttaatatttaataaaatactgaataatgctataactgccattaattgaagaccaatcgcatctaatgcgacaacacgatcggcaagtgatgggcctagcacaacgcgaatgagcatagctaacatagaaatgacaactatgattaatgcaataacgataataacattatgattcattatatttcgcccacctctcttacaattttctctaatgatgttttaatactttctacttcttgctctttagttgaaaaatctatggcatgaatataaatttttgtacgatcgtcacttacaccaagcactacagtaccaggtgttaatgtaattaaattagacagcaagacaatttgccaatctttttttaaatctgtgtgataaacaaagaatcctggttcatttttaatcgaaggtttaataataattttcaaaacatcaaaattagctttaatcagttcgattaagaaaataataactaatttaataatacgatatagcgtgatgacataaaatctacctggtaacactctgtgtaagaggtaaacaagaactaggccaaagatgaaacctaacacaaagttatttgttgtgtaactatttgtcacaaacaaccaaaacactgcgataataaagtttaatactaattgtacagccatgttatttacctcctaatacagctttaacgtaggttgatggattgtagaatgtttctgcaccagcttttaccattggatataagtaatctgctgacaatccatataaaacagttatcacaactgcaacgattgcaatcgtagttaaatatttgacgtcgactttgttattaagatcatatccttttggttgaccgaaaaagccttgtaggaatatgcgaatgacagaatataatacgactaaacttgataataagacgatgacaccacttaaataaaatcctctttcaaatgttgattggacaataaaaaattttccataaaagccactgagtgggggaatgccagctaaacttaatgctgcgataaagaatgaccaaccaagtacaggatatcgtttaattaagccaccaaattgtcttaaatcagcagtgcctgtaattttaatcataattccgataagcaagaataatgcaagttttactaacatgtcgtgcaatgtatagtaaatagccccaatcatacctgactctgtcatcattgcaacgccgactaagatcacacctacagcaatcatgacattgtataggatgatttttttaatgttggcatatgcaacagcaccgacacaaccaaagatgatcgttaatagtgctaagaataaaatgacataatgtgaaaagcttacattatcactaaagaataggctcaatgttctagcgattgcataaacaccaacttttgttaacaaagcaccaaagaatgcaatgattggaattggtggtgcatagtatgcactaggtaaccaaacaaacattgggaatacgccagcttttgtagcaaaaacaaagataaatagtatgaaaacgatattgactaagccactgtcatgcgctgaaaggttagctaatttattgcttatatctgctagattcaatgttcctactactgaatataaaatcgctacacccattacgaagaaggatgacgatacaacgttaacaagaacatattttattgtttcttgtagttgaatttttgtagaaccaattactaataagaaataagatgacattaaaaatacttcgaaaaatacgaataggttgaaaatgtcaccagttgtgaatgcaccaatgatacctattaacataaatagtactgaaaaataataataatatctttcacgttcaataccaattgtttggtatgaatataaaatcacaatagctgtaataataatactagtaattattagtagggcactgaatatgtctaatacaaagacaatactgtatggtgctttccatgaacctagctctacgcgtattggtccatgtttaacaacatttgctaaattgataattgccgcgaccaaggttaataatgtaccgcctagtgcgacataacgctttataataggacgctttccaataaagacaagtaatatggctgtaattactggaataactagcgttaacacaagcatattactttcaatcatcttctggaactcctttcatactctcaacgttatctgtgcctaattctttatatgttctaaatgctaatactaagaaaaaggctgttgtcgcaaaggcgataacgattgctgttaaaataagtgcttgcgggataggatcaacatagctttttacgttcgcttcataaattggaacagtaccatgtttaagtccgcccatagttattaaaaataaatttgctgcatgtgttaatagtgtagttcccataacaattcgtatcagacttttagacaaaacgagatagacactaattgctgtgagaataccactaacaaaaatcataataatttccactattcgttctctccaatcgaaataataattgtcatgacagtaccaactactgcacataaaacaccgaaatcaaagaatactgctgttgtcatatgaacaggttctaatataaataacggtatatcaaatgtgacatgcgtaaagaaatttttgcctaaaaaccaacttgcgataggcgtcgcaatacaaaaaactaatccgatacctatcaagattttaaaatctaatgggaaaattttacgcattgtttctatatcaaatgcaatcgtaatgataacaagtgaacttgcgaataataatccgccgacgaaaccgccaccaggtgtataatgtcctgctaagaaaagtgaaaaaccaaagaccattaccatgaaaaagataataactgcagcaaattgcaaaattagatcattttgttgtctattcatgatttttcacctcgttaccttgcgtttgacgctttttacgtaatttaatcattgtatatacagctaatcctgcgataccaagcacagatgactcgaataaagtatccataccacggaaatcaacaagtatgacgtttaccatgtttttaccgtgagctaaatcataaacgtgctcttgataaaacttagatatcgattcaaaatgtctatttccgtatgcaattaaaccgataataatgacggacaaaccaacaccaccagcaattaaagcattagtaagctggaatgagcgcttttcattataacgatttaaatttggtaagtggtagaagcataataagaacaatgctgttgaaatagattcaacgacaaactgtgtcaatgctaagtcgggtgctttaaagaatataaacaatacagacacagcatatccaactgcacttaacataatgatgctaaataatcttgatttagcgaaaagaattaaaaaggcagcacttaataataaaattacgatacaaacttcgaaaattctaatcggactaacgtctttaaaattaatgttgaaaggtactgagaatatagtgacaaatgttaataaaattaatgcaccaaaaatgataactaaattattacgtgaataatcggtaacatagctattcgtcatcttttcagagtagtttggaataacatttgcacttctgttgtaccaataattgaatgttagtttaccaggttgtcgttgcaacaatttcacccaataactaaatgtcacaattagtaagatacctaaaatataaatcactaatgttgataaaaaggcaggcgttaatccatggaacatatggaattcaacatcatcaattaccgtatgattaatcgaagatgtagctggttcaataatcgaattagttaaaatgccagggaataaaccaaatacaattactaatgtagctaaaatagctggtgataaaagcattaatattgatacttcgtgtgcttttttaggtaattgttcaggtttatattgtccgaaaaatatatgcattataaatttaattgaatatacaaatgtgaagacactgcccactataccaatgattgggaataggtagcctaatgtatcaacactgaataaatttgcttggcttgctgtaaatgttgtttctaaaaatgattcttttgataagaaaccattgaacggtggtacaccagccatacttaatgctgtaataacagtgattgtaaatgaaataggcataattgttagtaagccacctaatttcttaacatcacgtgtaccagtagaatgatccactgcacctgtaatcataaatagggcacctttaaatgttgcatggttgattaaatggaatattgcagccgtaaatgcagcagcatatattttgctatcatcgccttgatagtgataactaatggcaccgattccaagcatcgccataatcatacctaattgggatactgttgaaaatgccagtatacctttcaagtcttgttgttttgttgcgtttagcgaagcccagaataatgtaattaaaccaacgagtgtgacagtccatacccaaccttgcgatgctgcgaagattggtgtcattcgagcgattaaatataaccctgctttaaccattgttgctgaatgaagataagcactgactggtgtaggtgcttccattgcatctggtagccaaatataaaatggaaactgagcagattttgtaaaagcaccaatcatgattaaaatcatcgcaaaaatgaagaatgggctattttgaatttcagaagcatgttgaatcatgtactgaatgctaaatgattgtgttggtatagcgagtaagatgataccacctaataatgatagaccaccaaatactgtgattatgagcgatttttgagcaccatatatagatgcttgtcgttcgcgccagaatgaaataagtaaaaaactagaaaatgacgttagctcccagaataaatatagaataataacattatctgaaagtacgacacctaacattgcacccataaatagtaataaataacaataaaaattccctagttgttctgacttacttaagtagccgattgaatataatactactaaactgccgattcctgaaataagcaaactaaagagtaaacctaagccatcaagatataaatcaaagttcataccaaaatgaggcatccaatttaaggttttcattacagtattacctgacatcgtcgttttaattaatgtaagcatataaataaatatgacgatagggacaggtaatacgaaccatcctaaatgtatacgtttaaaaaatctatacaggataggaataatgagtgcgaatattaacggtaatatcaccgcaatatgtaacaaactcactatgttgtcctcctttaaaaaatatttatgttattcattatacatgaatgatatagttctgaaaaacgtacacactccttgttgtgctttattttcagaagtatttaaataagaagaaacacgtcattttttatttaaaattttctttgtattgaagtgaataatcttcttttaagcgtgctaaactagctaaagacatttcagcatgttttgtttgctgagctttaagtttagtttctaaatctgtaattgcttgttgaagtgaatcttcatagcgcaatacatcaacattgaagtcgcgtaattgtgaacgtttcgtatagcgtttttcaaaatggcttaatgctttgcggtcatggaaaaatacaccttcagtttcagtagggttatgtaaatcaccttgtttcgggtgtttgataacttgttcaactttaacaaggacatcgtctccattttcttcaacaatcgtgacaccatagctacctgttttgtgtgaaaatcgatatagcttcatgctattttcctcccttaaaagtatgttaatatatatgtatcataacatgaatggagaatataaatggctaactatccacagttaaacaaagaagtacaacaaggtgaaatcaaagtggttatgcacacaaataaaggtgacatgacattcaaattatttccaaatattgcaccaaaaacagttgaaaattttgtgacacatgcaaaaaatggttattatgatggaatcacattccaccgtgtcattaatgacttcatgattcaaggtggcgatccaacagctactggtatgggtggcgaaagtatttatggcggtgcttttgaagatgaattttcattaaatgcatttaacttatatggcgcattatcaatggctaactcaggacctaatactaatggttcacaatttttcattgttcaaatgaaagaagtacctcaaaatatgttaagtcaacttgcagatggtggctggcctcaaccaatcgttgatgcatatggcgaaaagggtggtacaccatggttagatcaaaaacatacagtattcggtcaaatcattgatggtgaaactacattagaagatattgcaaatacaaaagtgggaccacaagataaaccacttcatgatgttgtaattgaatctattgatgttgaagaataatatctaaacataattaactaccaacattttaaactcggataaagctaatttatgaatggattagtatatattccaacgaaaataaataaactaatatgatgagcaatctcaatatatttatcaagaaagcacagtttttaaatagatgtgtattttaaagataatagttgaggttgctttttatgtttttacagagaattgctattcaaatagtaaataaattgaaaacaaagtagctggatatcatattgatttagataggaatttgttgctaattttatttgtaaatccaagtttgtagaattcttattcatttataaaataatattcgtatgatttgattttttaattagtccaccatttcgatttgtgctatgataatagtgttaagtaaacgaaataaggggttattaagttgaataactacaaaattggccaacatatcaaggtgcgtgtaactggtattcaaccatacggtgcgtttgttgagacccctaatcatactgaaggactgattcatatatcagaaattatggatgactacgttcataatttgaagaaatttctatcagaaggccaaattgttaaagctaaaattttgtctatagatgatgaaggaaagcttaatctatcattaaaggataatgattacttcaaaaattatgagcgtaagaaggaaaaacaatcagtattagatgaaatcagagaaacagaaaaatatgggtttcaaacacttaaagaacgcttaccaatctggataaaacagtcaaagcgagcaattcgaaacgactaaaggaacagataaatcgtaccgaaaatcatacaaagggtctgaaatgaaagtttcttagactataaaagagattagtatctattaaattttattagatactaatctctttttgtctacgataacgtaatatgattgattctatttacacgtacaaatggtttaaggtgacatatccattatctttgttagatagaatcgttgatttgcaatattgtatgtggatttgttttttttatttattttagaaatgagaactacaacttaaagtattaaacgaattgcaactatataaacagataattggagaatgaaaaaattacatgttatagtcaactcaataattttaaggaggaattaagtaatgaaaagtaaatacgaaccattgtttgataaagtagaattaccaaatggagtagagttgagaaatcgatttgtgttagcccctttaacacatatttcttcaaatgatgatggtactatttcagatgtagaacttccttatattgaaaagcgttcacaagatgttggtattacaattaatgctgcgagtaatgtgagtgatgtcggaaaagcatttccaggacagccatcaatcgcgcatgacagtaatattgaaggactaaaacgattagctacagcaatgaagaaaaacggtgccaaagcactcgtacaaatacatcatggcggtgcacaagcattgcctgaattaacacctgatggagacgtcgtagcaccaagtccaatttctttaaaaagttttggtcagaaacaagaacatagtgctagagaaatgacgaatgaagagattgaacaagcaatcaaggattttggtgaagcaacgcgacgtgcaattgaagcagggtttgatggtgttgaaatacatggcgcgaatcattacttaattcatcaatttgtatcaccatactataatagaagaaatgatgtatgggcaaatcaatataaattcccggtcgctgtgattgaagaagtacttaaagcgaaagaagcgtatggcaataaagactttatagttggatacagattatctccagaggaagcggagtctccaggaatcacaatggaaattacagaggaactcgttaataaaattagccatatgccaatcgactatattcatgtttcaatgatggatacgcatgcaacgacacgtgaaggtaaatacgctggacaagaaagactgcctttaattcacaaatggataaatggtcgtatgccacttatcggtattggttcaattttcacagctgacgaagctttagatgcagttgaaaatgttggtgttgacttagtagccattggtagagagctactactggattatcaatttgttgaaaaaattaaagatggacgggaagatgaaattattaattactttgatccagagagagaagataatcatcacttaactcctaatttatggcatcaatttaatgaagggttttatccattaccacgtaaagataaataagtgtttaactgttaccactaatgatattgtgtatgcaatttgttagtggttttcaatatttataaataaaaatattcttagtaaaatatacttttgattaagtgtaaaattatcaattcttttgcttgtaatcatttaagtaattatgtcattataaatgtaagggttttcaaaatagacaaatttaatgaaacttagtgattatttcatcttttttggtggaaaagtatctgctttgaaaactaatgtaattatttggataatgtttcatgtataatagttataaatgatgaaaaggggagatatgatgactaaatctgaaaaaattattgagttaacaaatcattacggagcacataattatttaccattgccaattgtcatttcagaagctgaaggggtatgggttaaagatcctgaaggcaataaatatatggatatgttatctgcatattccgctgttaaccaaggtcatagacatccgaaaattattcaagcattaaaagatcaagctgataaagtgactttagtttcacgtgcttttcatagtgataacttaggtgaatggtacgaaaaaatttgtaaactggcaggtaaagataaagctttaccaatgaatacaggtgctgaagcagtagaaacagctttgaaagcagcacgacgctgggcatacgatgttaaaggaattgagccaaataaagcagaaatcattgcatttaatggtaacttccatggtcgaacaatggcgccagtttcattatcttcagaagcagaataccaacgtggttatggtccgttattagatggatttagaaaagttgattttggagatgtagatgcattgaaagctgcaattaatgaaaatactgcagcagttttagtagaaccaattcaaggtgaagcgggtataaatataccgccagaaggatatttgaaagcaattagagaattatgtgatgaacataatgtcttatttattgctgacgaaatccaagcaggattaggtcgttcgggtaaattatttgctacggattgggataatgtaaaacctgatgtctatattttaggtaaagcactaggtggtggagtcttcccaatttctgttgtattagcagataaagaagtattagatgtctttacacctggctcacatggttcaacatttggtggtaatccacttgcttgtgctgcatcaattgctgcattagatgttatcgttgatgaggatttaccaggccgctctttagaattaggagattattttaaagaacaattaaagcaaattgatcatccatcaattaaagaagtccgtggacgtggtttgtttataggtgtggaacttaatgaaagtgctagaccatattgtgaagctttgaaagaagaaggcttattatgtaaagaaacgcatgatactgtcattcgttttgcaccaccattaattattactaaagaagaattggaccttgcacttgaaaaaataagacatgtatttcaataatgtcaaaaagttgtaacaatcagtttgtaagggctttaaaaaggaatacgttatgttacaatatgtttgaaagcgaaatcattaggtaaagaagaggcgaaaaggatcatgactgagaacaataatttagtaacttctactcaaggaattattaaagaagcattgcataaattgggatttgacgaaggaatgtacgatttaattaaagaacctttaagaatgttacaagtgcgtatccctgtacgaatggatgatggcacagtaaaaacattcacaggttaccgtgcgcaacataatgatgctgttggaccaacaaaagggggcgtgcgtttccacccagatgttgatgaagaagaagtaaaagcattatcaatgtggatgactttgaaatgtggcattgtaaacttaccatacggtggtggtaagggtggtatcgtttgtgatccacgtcaaatgagcattcatgaagttgaacgtttatcacgcggatatgtaagagcaatttcacaattcgtaggtccgaacaaagatattccagcaccagatgtatttacaaactcacaaattatggcttggatgatggatgaatatagtgcattagataaatttaattcaccaggtttcatcacaggtaaaccaattgtattgggtggttctcatggacgcgacagatcaactgcactaggtgtagttattgcaattgaacaagctgcaaaacgtcgtaatatgcaaattgaaggtgccaaggttgttattcaaggtttcggtaatgccggaagtttcttagctaaattcttatatgatttaggtgcaaaaattgtaggtatctctgatgcttacggtgcattacacgatccaaatggcttagatatagattatttattagaccgtcgtgatagttttggtacggtaacaaatttatttgaagaaacaatctcaaataaagaattgtttgaattagattgtgacattttagtaccagcggctatttcaaaccaaattacagaagacaatgcacatgatattaaagctagtatcgttgttgaagctgctaatggacctacaacaccagaagcaacacgtattttaactgaacgtggtatattattagttccagacgtattagcaagtgctggtggtgtaacggtttcttacttcgaatgggtacaaaataatcaaggttattattggtctgaagaagaagttaatgaaaagctacgtgaaaaattagaagcggcatttgatacgatttacgaattgtctcaaaaccgaaaaatagatatgagacttgcagcatatatcataggtattaaacgtacagcagaagcagctagatatcgtggttgggcataattaattatcatatgtgatttaacgagcttgggacagaaaacaaagccctaagctcgttaattttattttagcagtagttgactgtaaaacaatgcccgtgtaacacgctcttttcaaaaatagtcggggccccaacacagaggctggtggaaagtcagcttacaatagtgtgcaagttggcggggccccaacacagaggctggcggaaagtcagcttacaatagtgtgcaagttggggtggagccccgacacagagaaattagctcctcaatttctacagacaatgcaagttggcggggccccaacacagaagctggcgaaaagtcagcttacaatagtgtgcaagttggggtgggacgacgaaataaattttgcgaaaatatcatttctgtcccactcccaaaaagacagcagtaggataatttcaatttggaaatatcttactgctgttttttatagtaatagctatatttttgtatttatgttttctagtttaacattactacttaatgacttctttatatttatcagcgaaatttgtaaagacaccatcaacgccatatttatttaatcgtaacatatcagctttttcattcactgtataaggatgtactataaatcctaagtcttttaaatgatgggtattttgttcagttaaatctgtataatcaggacctaatccaatcgcataagagcgtatctcttttaagcgttggtcgttaaattgttgtagttcacctttatcaactaattttactaatggcacatgcttattttgacgatgaattttctttaaactttcgtcagaaaatgattgaatcattacatgtccattttttaatttattgttatttaaaaggtgatgctttttcaatgaagctaataattgttcttccattcctgggtatacatcaggtgactttgtttcaatataatagtttgcattcgggccataacgttctaaaatttcatctaaagtgggtactttagcatttttataacttgctcttgcgtattttggatattttttattaaaccaacttcctgcatctaactgttttaattcatcaagggtataatcctcaactttaccgtgtccatttgttgtacggttaacagtttcatcatgcatagcaactaaatggccatctttggtacgttgtaaatcaatttcgatataagatgcttttaactcattatgactcttatcatatgcttgaaacgtatgctcgggtgcatagccacttgcgccacgatgtgcgatagtagtgaatcgctcattcgttaaatttgtatgccattgaatagcctgaggtttatttgcaatttgatttgtttgttcagcgccagcagtaggtactgataaaaatcccatagtaaaaacagcagaagcagccataaatttagtgaagcttttcgaagagttagtcatagtctttatcctttcatctctttatttgtagtctaacaattttaaaatactacaaaaacctgcttgtgaaaacgctttacacatttcttttacaatttataacatttttgtaatataaatttaaaagaattatcaaacattttaggaatcttaaaaatgtgatgttcaacaagacgaagagagcattaaaatacccacaatgtaattttaatagacattgtgggtaggtagattaacgtatttattgtgatagtaattgtttagcaacatcaagttgttgtttgaccgatgattgacctgttgaaccgtaactttgacgtcgttttaaacaattttcaggctgcaaataatcgtaaatatcggcatcaatactagaatgatgttgttgatatgttgctaaaggaacatctaataaataatgaccttgttgtatacattctaagacgatttttcctacaatttcatgtgcagttctaaatggaatatttttagttactaaataatctgctagttccgttgcatttgaaaaatcttctttaacagtttgattgagtcgttctttattaattgtcatcgtttgaatcataccttcgaaaatacgtaaagaacctttaattgtatggacagcatcgaataaaccttctttatcttcctgcatatctttgttatatgctagaggtaatccttttaaagtcataagcatgctcattaaatgaccagtcgttcgaccaactttacctctaattaattctgccatatcaggatttttcttttgtggcataatagatgagccagttgaaaatgcatctgataatgtaatgaatttagcttcgtctgtggaccagaaaataatttcctctgcaaagcgtgataagtgaaccatcgttaaagaaatattatgcaatgtttcaataatatagtctctgtcactaacagcatctaggctattctcatagagactgccaaagttcaacaatgctgttgtctcgtgtctatcgatagggtatgtggtaccacttaaggctgctgcacctaaaggattaatatcgattcgttttaaactatcttcaaatcgttgttggtctcgttgtaacatccaaaaataagtcataatatgatgtgcaaatgaaattggctgtgcacgctgtaaatgagtataaccaggcataattgtatcaacattattggaagcgatgtctacaattacactttgtaacgacttaattaatgcgatgatatcttgcacttgtttcttagtgtacaagtgcatgtctgttgcaacttgatcgtttctactgcgtccagtatgcaacttaccaccagcatcaccgatacgtttaattaattcatgttcaatatttaaatgaatatcttctaatgatgcactaaattgaatttgatcttgatgataatcatgttgaatagattttagtccttgtataatttgttcgctgtcttgttgactaataatgccttgattcgcaagcatagttgcatgtgcaatgctgccttcgatatcttgatctatgagcgtttgatcaaaagtaatggatgcgttaaagtcgtcaacccactcttcaggttgtacttcaaatctaccgccccaagctttattgctcattgctatagcctccatgcaacatcgcatttacttgagtaggtaaaccatagatatcgataaagccaacagcagcgtcttgattaaatgcatcttcttttgtataagttgctaatttttcatcatataatgtgtaaggtgattttctaccattcacgatggcattacctttgaataatttaattctgacatcaccacttacgtattgctgagtactatcaataaataatttcaagctatcagttaaaggtgagaaccaaagtccattgtatagttgttcagcaaattgcttctcaatgattggtttaaagtgtgcgacatctttcgttaacgtaatcgtttctaatgctttatgcgcttttaaaataacttctgcagcaggtgcctcataaatttctcttgatttgatacctacaagtctattttctacatggtcaattcttccgataccatgcttaccagctaatgcattcaacgttaaaattaaatcgtctaattcatatgttttgccatcaatttgaactgggatgcctttatcaaacgttaaaatgatttcatcagcagtatctggtgtttcttctaaagcatttgttagatcgaacgcatcctctggtggcgcagcataaggatcttctaaaataccacattcattcgctctgccccatagattttgatcgatagaataaggtgaatcatggttgattgatacagggatattatgtttaattgcataatcgatttcttcttcacgactccatgcccactcacgtacaggtgcgaatgctttcaatgatgggtttaatgctttaatggcaacttcgaaacgtacttggtcattccctttaccagtacaaccatgtgcaatacctactgaatttgttttctcagcaatctctactaattttttagcgattaatggtcttgataaagctgaaactaatggatatgcattttcatacattaaatttcctttgattgcataacttacatactcatcactaaattcttttgttgcatcaataatatgacattcaactgctcccatatctaaagcttttttataaacgatgtctaaatctttaccttcaccaacatctaggcaacaagctacaacgtcgtatcctttgtcgataagccattgaacggccacacttgtatctagtcctcctgaatatgctaaaacaattttctctttcataaaattcacctcattgtagttatctgaatatttcgtatgaacacatgatagcaaacttttaatgaaaataaaaccattattttacatatttattcataaaatgcgatagagatagttagagttgtaagtgtaaatgcttatttatcaatgtttaaaagtattttaaaaaacatgcaaattgtataaaaaatgtttgagtgtttgacgccagtttgaaatgtttgttgaaaaataggtgtgaaacgtcacataaatatcaattttattgattaagtacaaacttgtgaattgaatcgcaaacgtaaacttagtaaaattaagatattaaatgaaacaggaggcttttatagatgactcatattcaattagattttagtaaaacgttagaatttttcggtgaacacgaattaaaacaacaacaagaaattgttaaatcaattcacaaaacaattcatgaaggtactggtgcaggtagtgacttcttaggctggattgatttaccagttgattacgacaaagaagaattttcaagaattgttgaagcatcaaaacgcattaaagaaaattctgatgttttagtagtcatcggtattggtggttcttacttaggtgcacgtgcagcaatcgaaatgttaacgtcatcatttagaaacagcaatgaataccctgaaattgtatttgttggtaatcacttatcatcaacatatacgaaagagttagttgattatttagcagacaaagatttctctgtaaacgttatttctaaatctggtacaactacagaaccagcagttgcatttagattgttcaaacaattagttgaagaaagatacggtaaagaagaagcacaaaaacgtatatttgcaacaacggataaagaaaaaggtgctttaaaacagttggctacaaacgaaggttatgaaacgtttatcgtacctgatgatgtaggtggaagatattctgttttaacagcagtaggattattaccaattgcaacagctggaattaacatcgaagctatgatgattggtgctgcaaaagcacgtgaagaattatcttcagataaattagaagaaaacattgcataccaatatgcgacaattcgaaacattttatatgcaaaaggttatacaacagaaatgttgattaactatgaaccatctatgcaatactttaatgaatggtggaaacaattatttggtgaatcagaaggtaaagacttcaaaggtatctatccttcaagtgccaactacacaactgatttacattctttaggtcaatatgtacaagaaggccgtcgcttcttattcgaaacagttgtaaaagtaaatcatcctaaatatgatattactattgaaaaagatagtgatgatctagacggattaaattatttagctggtaaaacaatcgacgaagttaacacaaaagcattcgaaggtacattattagcgcatactgatggtggtgttcctaacatggtagtgaacattccacaattagatgaagaaactttcggttacgtcgtatacttcttcgaacttgcttgtgcaatgagtggataccaattaggcgtaaatccatttaaccaacctggtgtagaagcatataaacaaaacatgttcgcattattaggtaaacctggttttgaagacttgaaaaaagaattagaagaacgtttataaaatacattacttcaaagattagtgaagtttgaaaagatagaactagacgttaactatttaaagcatattttcgaggttgtcattacaaatgtaaaaatgtaatgacaacctcgtttttatttatatgcaagaactaggttactagctaatgtgacaagatgttaagagaaaattaaagataaaataatatctgccttacaataatattgttatactactagagactgatttattagcatgattacatgttaatgtttctttacttagtaattaactttataatgtaagaataattatcttcaaccaaagaaagggattgatgatttgtcgtttcatcaagtagaagaatggtttgagatatttcgacagtttggttatttacctggatttatattgttatatattagagctataattccagtatttcctttagcactctatattttaattaacattcaagcttatggacctattttaggtatattgattagttggcttggattaatttctggaacatttacagtctatttgatctgtaaacgattggtgaacactgagaggatgcagcgaattaaacaacgtactgctgttcaacgcttgattagttttattgatcgccaaggattaatcccattgtttattttactttgttttccttttacgccaaatacattaataaattttgtagcgagtctatctcatattagacctaaatattatttcattgttttggcatcatcaaagttagtttcaacaattattttaggttatttaggtaaggaaattactacaattttaacgcatcctttaagagggatattaatgttagttgtgttggttgtattttggattgttggaaaaaagttagaacagcattttatgggatcgaaaaaggagtgacatcgtgaaaaaagttgtaaaatatttgatttcattgatacttgctattatcattgtactgttcgtacaaacttttgtaatagttggtcatgtcattccgaataatgatatgtcaccaacccttaacaaaggggatcgtgttattgtaaataaaattaaagttacatttaatcaattgaataatggtgatatcattacatataggcgtggtaacgagatatatactagtcgaattattgccaaacctggtcaatcaatggcgtttcgtcagggacaattataccgtgatgaccgaccggttgacgcatcttatgccaagaacagaaaaattaaagattttagtttgcgcaattttaaagaattagatggtgatattattccgccaaacaattttgttgtgctaaatgatcaagataataacaagcacgattcaagacaatttggtttaatcgataaaaaggatattattggtaatgttagtttacgatactatcctttttcaaaatggactgttcagttcaaatcttaaaaagaggtgtcaaaattgaaaaaagaaatattggaatggattatttcaattgcagtcgcttttgtcattttatttatagtaggtaaatttattgttacgccatatacaattaaaggtgaatcaatggatccaactttgaaagatggcgagcgagtagctgtaaacattgttggatataaaacaggtggtttggaaaaaggtaatgtagttgtcttccatgcaaacaaaaatgatgactatgttaaacgtgtcatcggtgttcctggtgataaagtagaatacaaaaatgatacattatatgtcaatggtaaaaaacaagatgaaccatatttaaactacaatttaaaacataaacaaggtgattacattactgggactttccaagttaaagatttaccgaatgcgaatcctaaatcaaatgtcattccaaaaggtaaatatttagtgcttggagataatcgtgaagtaagtaaagatagccgtgcgtttggcctcattgatgaagaccaaattgttggtaaagtttcatttaggttctggccatttagtgaatttaaacataatttcaatcctgaaaatactaaaaattaatatgaaacaaatacaacatcgtttgtcggttttaatactgataaacgatgttttattttgttagtaccacaataaaagctaagttcgaaatgaacttataataaatcaatcacaatcactttgtgttaaaatatgtgtcaaaggaagtgagggtttgtcatgacattacatgcttatttaggtagagcgggaacaggtaagtctacgaaaatgttgaccgaaataaaacaaaaaatgaaagcagatccgcttggagatccaatcattttaattgcgccaactcaaagtacatttcaattagaacaagcctttgtcaatgatccggaattaaatggtagtttaagaacagaagtgttgcattttgaacgattaagtcatcgtattttccaagaagttggtagttatagcgaacaaaagttatctaaagctgcaacggaaatgatgatttataacattgttcaagaacaacaaaagtatttaaaactttatcaatcacaagcaaaatattatgggtttagtgaaaaattaacagaacaaattcaagattttaaaaaatatgcagtaacgcctgaacatttagaacactttattgctgataaaaatatgcaaactcgaactaaaaataagttagaggatattgctttaatataccgtgagttcgaacaacgcattcaaaacgagtttattacgggtgaggattcattacaatattttattgattgtatgccgaaatcagagtggctaaaacgtgctgatatatatattgatggttttcacaacttttcaacgattgagtatttaataatcaaaggattaattaaatatgcgaagagtgtcacaattatattgacgacagatggtaaccacgatcaatttagtttatttagaaaaccatcggaagtgttacgacatattgaagaaatagcaaatgaactcaatatttctattgaacgtcaatatttcaaccaattatatcgcttcaataatcaagatttaaagcatcttgaacaagaatttgatgcacttcaaatcaatcgagtggcatgtcaaggtcatatcaatattttagaatctgcgactatgagagaggaaataaatgaaattgcgcgacgtatcatcgttgatattcgtgataagcaattacgatatcaagatattgctattttatatcgtgatgaatcttatgcttatttatttgattccatattaccgctttataatattccttataatattgatacaaagcgttcgatgacacatcatccggtcatggaaatgattcgttcattgattgaagttattcaatctaattggcaagtgaatccaatgctacgcttattgaagactgatgtgttaacggcatcatatctaaaaagtgcatacttagttgatttacttgaaaattttgtacttgaacgtggtatatacggtaaacgttggttagatgatgagctatttaatgtcgaacattttagcaaaatggggcgtaaagcgcataaactgaccgaagatgaacgtaacacatttgaacaagtcgttaagttaaagaaagatgtcattgataaaattttacattttgaaaagcaaatgtcacaagcggaaactgtaaaagattttgcaactgctttttatgaaagtatggaatatttcgaactgccaaatcaattgatgacagagcgagatgaacttgatttaaatggtaatcatgaaaaggcggaggaaattgatcaaatatggaatggcttaattcaaatccttgatgacttagttctagtatttggagatgaaccaatgtcgatggaacgtttcttagaagtatttgatattggtttagaacaattagaatttgttatgattccgcaaacattggaccaagtaagtattggtacgatggatttggctaaagtcgataataagcaacatgtttacttagtaggtatgaatgatggaacgatgccacaaccagtaactgcgtcaagcttgattacagatgaagaaaagaaatactttgaacagcaggctaatgtcgagttaagtccaacatcagatattttacagatggatgaagcatttgtttgttatgttgctatgactagagctaagggagatgttacattttcttacagtctaatgggatcaagtggtgatgataaggagatcagcccatttttaaatcaaattcaatcattgttcaaccaattggaaattactaacattcctcaataccatgaagttaacccattgtcactaatgcaacatgctaagcaaaccaaaattacattatttgaagcattgcgtgcttggttatatgatgaaattgtggctgatagttggttagatgcttatcaagtaattagagatagcgatcatttaaatcaaggtttagattatttaatgtcagcattaacgtttgacaatgaaactgtaaaattaggtgaaacgttgtctaaagatttatatggtaaggaaatcaatgccagtgtatcccgttttgaaggttatcaacaatgcccatttaaacactatgcgtcacatggtctgaaactaaatgagcgaacgaagtatgaacttcaaaactttgatttaggtgatattttccattctgttttaaaatatatatctgaacgtattaatggcgattttaaacaattagacctgaaaaaaataagacaattaacgaatgaagcattggaagaaattttacctaaagttcagtttaatttattaaattcttcagcttactatcgttatttatcaagacgcattggcgctattgtagaaacaacactaagcgcattaaaatatcaaggcacgtattcaaagtttatgccaaaacattttgagacaagttttagaaggaaaccaagaacaaatgacgaattaattgcacaaacattaacgacaactcaaggtattccaattaatattagagggcaaattgaccgtatcgatacgtatacaaagaatgatacaagttttgttaatatcattgactataaatcctctgaaggtagtgcgacacttgatttaacgaaagtatattatggtatgcaaatgcaaatgatgacatacatggatatcgttttacaaaataaacaacgccttggattaacagatattgtgaaaccaggtggattattatacttccatgtacatgaacctagaattaaatttaaatcatggtctgatattgatgaagataaactagaacaagatttaattaaaaagtttaagttgagtggtttagttaatgcagaccaaactgttattgatgcattggatattcgtttagaacctaaattcacttcagatattgtaccagttggtttgaataaagatggctctttgagtaaacgaggcagccaagtggcagatgaagcaacgatttataaattcatccaacataacaaagagaattttatagaaacagcttcaaatattatggatggacatactgaagttgcaccattaaagtacaaacaaaaattgccatgtgctttttgtagttatcaatcggtatgtcatgtagatggcatgattgatagtaagcgatatcgaactgtagatgaaacaataaatccaattgaagcaattcaaaatattaacattaatgatgaatttgggggtgagcaatagatgacaattccagagaaaccacaaggcgtgatttggactgacgcgcaatggcaaagtatttacgcaactggacaagatgtacttgttgcagccgcggcaggttcaggtaaaacagctgtactagttgagcgtattatccaaaagattttacgtgatggcattgatgtcgatcgacttttagtcgtaacgtttacaaacttaagcgcacgtgaaatgaagcatcgtgtagaccaacgtattcaagaggcatcgattgctgatcctgcaaatgcacacttgaaaaaccaacgcatcaaaattcatcaagcacaaatatctacactccatagtttttgcttgaaattaattcaacagcattatgatgtattaaatattgacccgaactttagaacaagcagtgaagctgaaaatattttattattagaacaaacgatagatgaggtcatagaacaacattacgatatccttgatcctgcttttattgaattaacagagcaattgtcttcagatagaagtgatgatcagtttcgaatgattattaaacaattgtatttctttagcgttgcaaatccaaatcctacaaattggttggatcaattggtgacaccatacgaagaagaagcacaacaagcgcaacttattcaactactaacagacttatctaaagtatttatcacagctgcttatgatgctttaaataaggcgtatgatttgtttagtatgatggatagcgtcgataaacatttagctgttatagaagatgaacgacgtttaatggggcgtgttttagaaggtggctttattgatataccttatttaactggtcacgaatttggcgcgcgtttgcctaatgtaacagcgaaaattaaagaagcaaatgaaatgatggtcgatgccttagaagatgctaaacttcagtataaaaaatataaatcattaattgataaagtgaagagtgattacttttcaagagaagctgatgatttgaaagctgatatgcaacaattggcgccacgagtaaagtaccttgcgcgtattgtgaaagatgttatgtcagaattcaatcgaaaaaagcgtagcaaaaatattttggatttttctgattatgaacattttgcattacaaattttaactaatgaggatggttcgccttcagaaattgccgaatcataccgtcaacacttccaagaaatattggtcgatgagtatcaagatacgaaccgagttcaagagaaaatactatcttgcatcaaaacgggtgatgaacataatggtaatttatttatggttggagatgttaagcaatccatttataaatttagacaagctgatccaagtttatttattgaaaagtatcaacgctttactatagatggagatggcactggacgtcgaattgatttgtcgcaaaacttccgttctcgaaaagaagtactgtcaacgactaactatatattcaaacatatgatggatgaacaagtcggtgaagtaaaatatgatgaagcggcacagttgtattatggtgcaccatatgatgaatcggaccatccagtaaacttaaaagtccttgttgaagcggatcaagaacatagtgatttaactggtagtgaacaagaagcgcattttatagtagaacaagttaaagatatcttagaacatcaaaaagtttatgatatgaaaacaggaagctatagaagtgcgacatacaaggatatcgttattctagaacgcagctttggacaagctcgcaatttacaacaagcctttaaaaatgaagatattccattccatgtgaatagtcgtgaaggttactttgaacaaacagaagtccgcttagtattatcatttttaagagcgatagataatccattacaagatatttatttagttgggttaatgcgctccgttatatatcagttcaaagaagacgaattagctcaaattagaatattgagtccaaatgatgactacttctatcaatcgattgtaaattacattaatgacgaagcagcagatgcaattttagttgataaattaaaaatgtttttatcagatattcaaagttaccaacaatatagtaaagatcatccggtgtatcagttaattgataaattttataatgatcattatgttattcaatactttagtggacttattggtggacgtggacgacgtgcaaatctttatggtttatttaataaagctatcgagtttgagaattcaagttttagaggtttatatcaatttattcgttttatcgatgaattgattgaaagaggcaaagattttggtgaggaaaatgtagttggtccaaacgataatgtcgttagaatgatgacaattcatagtagtaaaggtctagagtttccatttgtcatttattctggattgtcaaaagattttaataaacgtgatttgaaacaaccagttattttaaatcagcaatttggtctcggaatggattattttgatgtggataaagaaatggcatttccatctttagcttcggttgcatatagagctgttgccgaaaaagaacttgtgtcagaagaaatgcgattagtctatgtagcattaacaagagcgaaagaacaactttatttaattggtagagtgaaaaatgataaatcattactagaactagagcaattgtctatttctggtgagcacattgctgtcaatgaacgattaacttcaccaaatccgttccatcttatttatagtattttatctaaacatcaatctgcgtcaattccagatgatttaaaatttgaaaaagatatagcacaaattgaagatagtagtcgtccgaatgtaaatatttcaattgtgtactttgaagatgtgtctacagaaaccattttagataatgatgaatatcgttcggttaatcaattagaaactatgcaaaatggtaatgaagatgttaaagcacaaattaaacaccaacttgattatcgatatccatatgtaaatgatactaaaaagccctcaaaacaatctgtttctgaattgaaaagacaatatgaaacagaagaaagtggcacaagttacgaacgagtaaggcaatatcgtatcggtttttcaacgtatgaacgacctaaatttctaagtgaacaaggtaaacgaaaagcgaatgaaattggtacgttaatgcatacagtgatgcaacatttaccattcaaaaaagaacgcatatctgaagttgagttacatcagtatatcgatggattaatcgataaacatattatcgaagcagatgcgaaaaaagatatccgtatggatgaaataatgacatttatcaatagtgagttatattcgattattgctgaagcagagcaagtttatcgtgaattaccgtttgtagttaaccaagcattagttgaccaattgccacaaggagacgaagacgtctcaattattcaaggtatgattgacttaatctttgttaaagatggtgtgcattattttgtagactataaaaccgatgcatttaatcgtcgccgtgggatgacagatgaagaaattggtacacaattaaaaaataaatataagatacagatgaaatattatcaaaatacgcttcaaacgattcttaataaagaagttaaaggttatttatacttcttcaaatttggtacattgcaactatagtattttgattttcaaaagaataaaaaataatttcgattaagtgcaaagtccttgtagcagaatgaacacaactcattttcaaaattgtcttacttatttatttgttatttgataacgaaaaaagttataatgtgaattaagataaagatgaggagttgagaatgaatgaaattcttatcattcaagtataatgacaaaacttcatatggcgttaaagtaaaacgcgaagatgctgtatgggatttaacacaagtatttgctgactttgcagaaggagatttccatcctaaaacattgttagctggtttacaacaaaatcatactttagattttcaagaacaagtacgtaaagcagttgtagcagcagaagatagcggcaaagctgaagactataaaatttcatttaatgacattgaatttttaccaccagtaacacctccgaataatgtgattgcttttggtagaaattacaaagatcatgcgaacgaattaaatcatgaagtggaaaaattatatgtatttacaaaagcagcgtcatctttaacaggagataatgcaacaattccaaatcataaagatattactgatcaattagattatgaaggtgaattaggtattgttattggtaagtctggtgaaaagattccaaaagcattagctttagattatgtttacggctatacaattattaacgatatcactgatcgcaaagcacaaagtgaacaagatcaagcatttttatcaaaaagtttaactggcggttgcccaatgggtccttatatcgttactaaagacgaactaccattacctgaaaatgtaaatattgttacaaaagttaacaatgaaattagacaagatggtaacactggcgaaatgattcttaaaattgatgaattaatagaagaaatttcaaaatatgttgcactacatccgggagatattattgcaactggtacaccagcaggcgttggtgcaggtatgcaaccacctaaatttttacaaccaggtgatgaagttaaagtgactattgataatattggaacgctgacaacttatatcgctaaataattatcatttaaaaagctaaccagtctttatatagattggttagttttttcttgcttttctaaaaaggtgttaaagataaattatttataatgttaccattttgagatgaaagtgaaatattgatattaagaagtagttgattattttacagcagattcacaatattctaataaggaataaaatgtcatgttcttcctctcaaatatagaagtgtggtagaatatatattcgtgtataatcaaatcatgattaaattacaagcaagtgggtattaatcccaagaagctttaatttaataatataaataattaaagtggggggaatcagtatgttacatttacatatattaagttgggtattagcgattattttatttatcgctacatacttaaacatttcaaaaaatcaaggcagatcaccatttttcaaaccgttgcacatgattttacgcttatttatgctgttgacgttaatttcaggattttggatattaattcagtcatttatgaatggcggggcaaatcatatgttgcttacattgaaaatgctgtgtggtgttgcagtagttggattgatggaagtgtcgattgctaaaagaaagagacatgaacaaagtcacacaatgttttggataacaattgcattaattatcatcacaatggtattaggtgtcattctaccgttagggcctatatcaaaattattcggtattggctaattgataagacatatagtatatgacataaggcatggacaattattagtccaagaccttatgtcttttttgattctaaaaatgttaaacataaaaaatggactggatagtagtaccagtccaacataattctaacctagacaattaagattagattgaatcgcatgattcatttatttagctttgtaaccaatcatattgattaaatctttagggtggctatatggtggtgcataagccacttcaaactcagttaactcatctacagttagctggttcatcattgccatcgatagtacatcaatacgtttatctgcaccttcttttcctactgcagctgctcttaaaatctgacggtttgaagtgtcataatatactcttaagtgtaaaggggaatttcctgggtaataattcgcgtgtgcaccttgagtgacttctaccattttatagtcaaattgctttagttcgtttggtttaacgccgacactcgcaaatgtataatcaaagaacttcacaatattgttgcctaagaagcctttgaattcaatagtgtcatttccagcaatttgttcggcaacaatacttgctgcacggtgagcgccccaagctaaaggaacactagccggtagatcgacatgtcgataatgtgatgttgcaatatcgcctattgcataaatgtttggaacatttgtttcaaatttatcgtttaccggtatgaaaccttttcgatcaagtttgatatttgaactttcgataaattttgaattggggtgagtaccgacaccttcaataatcatatcgtaatgttcaacttttcctgatttaaatgtaatttcatttccattgatagcattaatttcctcatttaaacggtatggaatctcccgcttatctaattcatcaagtataggttgattcatgtcggcatccattaatttatttatcttatcagatcgatgaattaaagtagggtgtaaaccacgttcataaagattttcaagaacttctaatgaaacataacctgcacctacaaccaatactttatcaacttgatttgctttgatgaattgatcgatagcatcagtgtcttctaaatttctaagtgtaaatgtaatatcactttcaaagccaaggctatttgcacttgcaccagggcttaaaatgagtttatcgtaagattcttcaaattgttcgtttgtctttctatttaatacagatacagtttgtctttcatcattgattgcaataacttcatgataagtttttactgtaatttgctttctatcataaaatttttcaggtgtatacgctaaagcatatcttctatcttcaacaacttcgccaatgacataaggcaatgcacaattagcaaagctcatatcacgatctttttcaaaaataataatgtcactttctttatctaaacgtcgaatttggctggcacatgttgcaccgccagcgactgctccgactacgactattttgggcatcgtaacttacctcctattgttttaaaatattataaaatgattagttataaattaacagtaatatctaatatttaaattaaagaaatcattcaaatatcgaccaatgccatcttcattattgttgaatgtaatattgttcgctacatctttaagttcttgcaaaccattttccatagcaacaccgtgacgcgcgtactcaatcatttcaatatcattatcttcatcaccgaatgcaataatattatttcggtcaatatttaaaaattgtctaacttgctcaatgcctcttgctttattaataccaagttttacaatttcaatgacagggaatggtgcgccccagcgtcgatgctcaatatgatcggcataaaaatgagtaagcatatttttgatttcaggtattttactttcttcggcttcaattaaaattgaggtaggggattctttcaagtggacaagtaaattaccagtttgaattcttggattacccattgaaaaaccttcaaataatcttggatcatgattgttaatgaaaacataatctttcacttctgctataatattcgatacttgatattgttgtaatccttgaataatgttttgtgcgatgcctaaatctaaaatttcatggcaagttttgaagtttttatctttagggtgatgtacgtaagcgccattaaaattaacaattggtgtcgttaaatttaattcatgataatacatttgacttgcacgataaggtctgccagtcgcaatcataatttggtgtccacgttgttgtaattcatttaatacttgtttagtatatgatgaaatttctttgttatcgtttaataatgttccgtctaagtctagacatattaaatgtggttgcatatctctctcctcataagttgcttagttcatatagatacatcatagcattttattggcgttttgtcggatatttgatatattatgaataatatgacattaaagaggtgatatggatggaagaggcattgaaagatagtatcttaggtgcattagaaatggtaattgaccctgaattaggaattgatatcgttaatttgggtttagtatacaaagtgaatgttgatgatgaaggcgtatgtacagttgatatgactttaacatcaatgggatgtccaatgggacctcaaattattgatcaagttaaaacagtattagcagagattcctgaaattcaggatactgaagtgaatatcgtatggagtccaccttggacaaaagatatgatgtcacgttacgctaagattgcacttggtgtgagctaacataaacttgcattgcctgtagaatttcttttcgaaattctctgtgtttgggcccgcagtcaatataacattgtagagtataattcattgtgaataagctcccttcaaagtagacattgaaaaatgaaaattttgaagggagccttatttatgttctagtttctgattttattttgaaaatttatatctaacttgtttcaaaaaatatgaattaagacagtgacttgcacttccaagagtgcacaattcattttctagttgaatattttcttgaaaatttttataataaattgaatttatattacagttatattacaatacataatacttcatagtttttaagttgccgagttgcattacaaattggatttcgaagtaagaatcatcattggtaatttttttaatttaacagtattttagtcaatatgattttgatgatgtcgtaattcaataatatacatatgcatttcaatattcttttaaacagcataactaaatttaattaagcatctaagaagaacagttttaaaagggaagaatgcaaaaatgaacaaaacaaagggttttacaaagtataagaaaatgagatatattccagggctcgatggtttgagggcaatcgctgttctaggaattattatttaccacttaaataagcaatggttgacaggtggctttttaggtgtggatacattttttgtgatctctggttatttaattacaagcttattactcaaagagtatgatgacacaggtatcattaaattgaaaagcttttggatacgtcgtttaaaacgtttattaccagcagtcatagttttattaatggttgtagggacagcaaccttattattaaaatcagataatatcattagggttaaacatgatattattgctgcgatattttatgtatcaaactggtggtatatagcaaaagatgttaattattttgagcaattttcatttatgccattaaagcatttatggtctttagcaattgaagaacagttttacatatttttcccagttattttggttacattattgttaacaattaaaaagcgatacaaaataggatttattttttggggagtatcaataatttctttagggttaatgatgtttatctatagtattaatggggatcattcacgagtgtattttggtacagatactagattacagacattgttactgggtgttattttagcttttttatggccaccgtttaaattgaaaaatgatccacctaaagttgtaaaatatgttattgatagcataggtagtttatcatttatagtacttatattattatttttcattattaatgatgagacgaattggatatatgatggtggtttctatttaatatccatattaacgttatttattattgctagtgtcgttcatccatctacatggatagcgaagatattttcaaatccagtgttagtatttatcgggaaaaggtcttatagtttatatttatggcattttgcagtaattagtttcgtacatagttactatgtagacggacagatacctgtatatgtgtactttatagatataagtttaacaattatatttgcagagctatcatatcgctttatagaaactccatttagaaaagaaggtattaaagctttaaattggcgaccttcttatataccacaatttataagaatggcaattgtagtaaccttgttaattccatttatgttgattttagtaggtgcattcaataaatatggtaaagacattattggagaaaaagcgaatagctttgataccacaattgaagataattatttaatgcggatagcaccaattgataacatacacattgatggcttagtaagtgagaagaaaaaggaatcttccgacgtatataataatattaaacctcttttaatcggtgattcagtaatggttgatatcggtgagtcatttaagtcatcagttcctaagtctagaattgatggaaaagtagggcgtcaattgtatcaaaccttacctttagttaaagcgaattattcacaatataaaaaatcatctgatcaagtcgtattagaattaggtacaaatggcgactttactgtcaaacagctcgacgatttacttaatcaatttggaaaagccaagatttatttagttaatacacgtgttccaagaatttatgaggcaaatgtaaatcgattattagctgacgcggcgaaacgaaagtccaatgtcacattaattgattggtataagcgatcacaaggacatagtgaatattttgcaccagacggtgtacatttagagtacaaaggagtcctagctttaaaagatgaaatattaaaagcacttaaaaagaaataacatatgtttaataagtctagttaatgtgtaacgtaacattagctagatttttttattcaaaaaaatatttacaaatattaggaaatttaagtgtaaaagagttgataaatgattatattgggactataatataattaaggtcaaagaaagtcaaagtcaaaagtgcaacttgaccaactctacaaattagaggtgaaattatatggatataaataaaatgacatatgctgttcaaagtgctttacaacaagcagttgaactgagtcagcaacataaattacaaaatatagaaattgaggcaattttaagcgctgccttaaatgaaagtgaaagcttatataaaagtattttagaacgagtaaatattgaggtagatcaattaaacaaagcttatgaagacaaactaaacacgtatgcatctgtagaaggtgacaatatacaatatggtcaatatattagccaacaagcaaaccaattgataactaaggctgaatcatacatgaaagaatatgaagatgaatatatttcaatggagcatattttacgttcggcaatggacattgatcaaacaacaaaacattatataaataataaagtagaagttatcaaagaaattattaaaaaagtaagagggggaaatcacgtgacatcacaaaatccagaagttaattacgaagcattagctaaatatggccgcgacttagtagaagaagttagacaaggtaaaatggatcctgttataggaagagatgaagaaattcgaaatacgattcgtattttaagtcgtaaaactaaaaacaaccctgtgctcattggtgaaccaggtgttggtaaaactgcaattgttgaaggattagcgcaacgtatagttaagaaagatgtgccagaatcattattagataaaactgtttttgagttagatttaagcgcattagtagcgggcgctaaatatcgtggtgaatttgaagagagattaaaagcagtcctaaaagaagttaaagagtctgatggtagaattatattatttattgatgaaatccatatgcttgtaggtgctggtaaaacagatggtgccatggatgcaggcaacatgctaaaaccaatgttagcacgaggagagttacattgtattggtgcaacaactttaaatgaatatcgagaatatattgaaaaagattcggcattagagcgtcgtttccaaaaagtagcagttagtgagcctgatgttgaagatacaatttcaattttacgtggtttaaaagaacgatatgaagtgtatcatggtgtgcgtattcaagatagagccttagttgctgccgctgaattgtctgatcgttacatcactgatcgttttttaccagataaagcgattgatttagttgaccaagcatgtgcaacaattcgtacggaaatgggatcaaatccaactgaattggatcaagttaatagacgtgtcatgcaattagaaattgaagaaagcgcacttaaaaatgaatctgacaatgcgagcaaacagagattacaagaactacaagaagagcttgccaatgaaaaagagaaacaagcagcacttcaatctcgtgtagaatcagaaaaagaaaaaatagcaaatttacaagaaaaacgtgcgcaactagatgaaagtagacaagcgttggaagatgcacaaacaaataacaatttagaaaaagctgctgaactacaatatggaacaattcctcaattggaaaaagaacttagagaattagaggataatttccaagatgagcaaggtgaagatacagatcgaatgattcgtgaagttgtaacagacgaagaaattggcgatattgtcagccaatggacaggcataccagtttcaaaattagttgaaacagaacgtgaaaaattacttcacttaagtgacatcttgcataaacgtgttgtaggtcaagataaagcggttgacctggtttcagatgcagtagttagagcaagagcaggtattaaagatccaaacagacctattggtagtttcttattcctaggtccaactggagtaggtaaaactgaattagctaaatcattagctgcatcattatttgattctgaaaaacatatgattcgtattgatatgagtgaatatatggaaaaacatgcagtatcaagattgataggggcacctccaggatatattggacatgatgaagggggtcaattaactgaagcggttcgtcgtaatccatactcagttattttattagatgaggttgaaaaagcgcatactgacgtctttaatgtattattgcaaattttagatgaaggccgtttaactgattctaaaggacgtagcgttgattttaaaaatactattattattatgacaagtaatattggatctcaagttttattagaaaacgtaaaagagactggtgaaattacagaatcaacagaaaaagctgttatgacaagtttaaatgcatatttcaaaccagaaattttgaatcgtatggatgatatcgtattatttaaaccattatctattgatgacatgagtatgattgtagataaaatcttaacgcaattaaatataagattattagaacaacgaatctcaattgaagtttctgatgatgctaaagcttggctaggtcaagaagcttatgaacctcaatacggtgcaagaccattaaaacgttttgtacaacgccaaattgaaacaccattagcacgtatgatgattaaagagggattcccagaaggtacaacgattaaagttaatttaaattcagacaataacttaacgtttaatgttgaaaaaattcatgaataaaattgaaccaagaatgtgatgattaatcgcattcttggttttttagatttgaaatttattataattgttcattggcaatatactttttaaatgatttaataaacaccaatatttctgggctttcttttttgctgtatatatatgtaaatgaaataggtgcttgtaaaattttcgtgttaataaccgaaatattgtaatcactatttgttgttatataaagaggcaggaatgatataccttgattcatttcgattaatttaattgaagtatgcacatcattgatagatagaaattgtgctttttcataaatatttaaaatattatttttaagtgatgaccaatattctggatggttatcacttattattttgtatttttcaaataaagatgcctcagttagaagatgattattctctttattgggagcaatcaatacaattttaccttcgcatactttttcagaatgaacttctcttagtttaggttgatttctgctaatcccgatgtcatacgtatgattattaatatctttttcaatattttcatttttgacatgaagagaaacatcgataaaaggatgctcgttaaagaaagattttaaaaatttgggcataatgaatgtcgcgatatatgaagacacgacaacatttaatttcgattgaaacatcgtttttttaagttggatatgtttgatgccactttcatattgttcaataaaactttgcgcaattggaagaaatgtatgaccatcttcagtcaagataatttgatttttataagtttcaaatagtttcacattgagatgctgttctaaatttttaatttgcttatgtatagaaggtatagtgagattaatttcttcactagctaatcgatagtttaacgtcttcgctaaaatgacaaatgtatagtaccaatctaaattcatgaacttacctctttcaaaaaagttaataattcattagataatatttaatttttattgcataaaaataatattaatattatatcagaggttatcgagggggtgaagtaatatgattcgaattcaagataatacaataagggatggtatgcaacaaagtaatgttcgaaaaagtctaattataaaaaaagaagtattgaaacaaattaacaagttaaatataaattctgttgaagtaggcatgtgtacaactatcgaggatgaatttaatattcatcaattcagagacattttaagtcctgaaaaagaattagtagtattgactaggcttaatgaaaaagaaataaaaaaaatagtcaaattgaaaattcataatttagtggtaaaaatactattgccaatatctgacttgcatataaaagaaaagcttaatttttcaaataaatattatattcagaaaatcaaagactgcttggatatattaaagaaagataaaaaaggagtagatatttgttttgaagatggaacaaggacttctagagaaaaattgaaagaatacatggaaattatttcaaaatatcaagttagaacagttacatttgcggacactgtaggatgttcgacaccattagaatacggagatatttttaattactttgtaaaaaaatattctaacataattttttctgctcattgtcataacgatctagggttggctactgcaaatacattagctgcaattttaaatggtgcaaagcaaatagaaactacatttttgggaattggtgagagagcgggtaatgctcctattgaggaaataattactattttgacaaaaaaacaaatagaaagtacggaattcactttacccgacgtatataaaactagtattaatatttctaaaattctcgattttcaaatatcagaaaacaaacctataattggtgaaaatatatttaaacatgaatcaggaattcatcaagatggtactaaaaaaaatataaatatgtatcaatatttagttcctagtgatttaggattgaaaaattcacaagttgttcagtttccaataagtaatatttctagtaagaaaatcttgcacaataaatttaaatcaatagttaacactgaagaaattgatgaaaatatttctttctataaacttgtgaacaagttttcacctgaagtagcacctgaagatacagtggatttacttcagataataaaaaggaggagtaaagatggaaattttaaatgattctgtaaaaagttttgaaaaactttatttacaattacaagatggttttccagtgattgttcctactgatactaattataatttatgtagtttacctaacaacgatctttgtatcgataaaatatttgaatataaaaagcgatcgaaagataagccattatcattatttattgataagccagaggattggaaattgtatggagataatcaaaatacggaaatagttgataaactagttgaaatattttggcctggaccattaaatattattttaaaaaataaaacaagctataattatatgctcaataattcagatagtatagctataggatgtgtacaaaataaaacgatgagaagatttatttcatatattaattcacctatagcaattacttcagcaaatatatctggaactgccgatgatattttaataactgaaaatgaagcaattaagcacatgggcgaaaatgtaagatatatgctaagaagtcaaaataaaactaactataaaacatctagtacgattattaaagtgacagataataaaattgaattattaagagaaggagatataaagtttgaagaaataaaagaaagactaggtacaggtattatttatgaataagttaatacttgggatttatttataccgaattttttcacgagcatacttttatttaccgtttttattaatttactttttgattcaaggttattccataatacaattagaaatattaatggcgtcttatggcattgcagcatttttattctctctatacaaagagaagtgttttaaaatttgtaacttaaaagattctaataaattagttgttagtgaaatattcaaaatcatcggtttattgttgttattatatcaaaatcaatatttaattttagtagtggcacaaatattattagggttaagttactcaatgatggcgggtgttgataccgcaataattaaaagaaatataacaaatgagaaatacgtacaaaataagtcaaatagctatatgttcctatcattattaatttcagggattataggtagttatctttatggaataaatattaaatggcctataataatgactggtatattttcaattctaacaattataattattcgatgcacattagttgaaaatagggaattaaatttaataggagaaacaaagggaaagataaagaaatttctaccagaagagaagttttggatattgcattattcttttttaagagcgttaatattaggattttttataggatttattccaattaatatatataatgatttaaaactgaataatttacaatttatttcagtattaacttgttacacagttatgggttttgtatcttcacgttatttaactaaatacttgaattataagtttgtgtcagaaatttgtttagtaatatttttaataatatatacatatcaaagtttcatagcagttactatttctatgatatttttaggtatttcttcagggttaactcgtccacaaactataaataaactttctagcagtagtaacttaagagtgatgcttaattatgcagaaacgttatattttatttttaatatcgcatttttacttatgggtggttacttatatacaataggaactattcaatacttaatattatttatttcgttattaatttttatatatttaataataatattttattttacaaggagagagcaacatgaaaataaaaactgaatttaaagggaacaatataccatatgaatacgcagcaggtgcagatgtgagtgattctattaacgggaatccaattaagtcatttccatttgaagtaattgaattaccggaagggactaaatatcttgcttggtctttaattgactatgatgcaattcctgtatgtggctttgcttggattcattggagtgtagctaatgtaagtgttagtggcaattcaatttctataaaagcagatttatcaagaacaaagggcgactatgtacaaggtaaaaatagctttactagtgggttgttggctgaagatttttcagaaatagaaaatcactatgtaggacctacaccacctgatcaagatcatcaatatgaattaacagtttatgcgttagatcattctttaaatttgaagaatgggttctacttgaatgaatttttaaaagaagtaaatcaacataaaattgatcaaacaagtattaaccttataggaagaaaaatttaatactaaatatctcatcaatataaaattgttcaattaaaagtacaaagaaacaaaggttttaatttatatattaggtacggcgttcgctataatgcaaagaagtaattaaatttaagaaatgtaaacttagttattgtaatgtgaatttatttgaaaaaatagaaagtattaacaattatagcttttacattaattaaaatttatttttaaaaacaagtaaacaatttacatacttataatttttgaaaattttcaatttgtgttatattgattttgtaagatactttaactcacaaaggagagagagtatatgaaattaaaatcatttataactgtaactttggcactgggcatgatcgcaacgactggcgctactgtggcaggtaatgaggtatctgcagcagaaaaggacaaactaccggcaactcaaaaagctaaagaaatgcaaaatgttccatatacaattgcagtagatggcattatggctttcaatcaatcttacttaaatttaccaaaagatagccaattatcatatttagatttaggaaataaagttaaagctttgttatatgatgaacgcggtgtaacacctgagaagattcgaaatgcaaaatctgccgtttacacgattacttggaaagatggtagtaaaaaagaagtggatcttaagaaagatagctacacagcaaacttgtttgattcaaattcaattaaacaaattgatattaatgtaaaaactaaataaacacttaaaattatcaaattcaacatgaagcatttaattttacagtgatgattataaaataattgccttgatacaaagattactcgtaaatgacatctttgtattaaggctttttctaaatttaaaagtgatgggttagaggtcattgagctttaaaatattcaaaatacaaaacattaatggccaaaaataaaagccgcctttatctgggcagcttcaataataagaaagacatatttcattttatactaaatagttattgtgatgaatctttcggcggtttaattactgcagcaaaaattgctgtgaaaatcgtgaacaatactgccatgataattggattcactacatttaagctgtctccacctactaggctattaagtacaaagttaaccatttgcattaataataatgcccaaaagaatgttacgaggtgtttcatgtcattctacctccactttaattatatatattttattttaagtgaaagttagaaatttgtatagtaacatctcatatattttgaccatattatacagtttaaataaatgattttatctgaatggctattctaaattaagcgcattaaaaccaatttcatactgaaatttgacgataataaagcattaaaattttattaactagtcaatattcctacctctgacttgagtttaaaaagtaatctatgttaaattaatacctggtattaaaaattttattaagaaggtgttcaactatgaacgtgggtattaaaggttttggtgcatatgcgccagaaaagattattgacaatgcctattttgagcaatttttagatacatctgatgaatggatttctaagatgactggaattaaagaaagacattgggcagatgatgatcaagatacttcagatttagcatatgaagcaagtttaaaagcaatcgctgacgctggtattcagcccgaagatatagatatgataattgttgccacagcaactggagatatgccatttccaactgtcgcaaatatgttgcaagaacgtttagggacgggcaaagttgcctctatggatcaacttgcagcatgttctggatttatgtattcaatgattacagctaaacaatatgttcaatctggagattatcataacattttagttgtcggtgcagataaattatctaaaataacagatttaactgaccgttctactgcagttctatttggagatggtgcaggtgcggttatcatcggtgaagtttcagatggcagaggtattataagttatgaaatgggttctgatggcacaggtggtaaacatttatatttagataaagatactggtaaactgaaaatgaatggtcgagaagtatttaaatttgctgttagaattatgggtgatgcatcaacacgtgtagttgaaaaagcgaatttaacatcagatgatatagatttatttattcctcatcaagctaatattagaattatggaatcagctagagaacgcttaggtatttcaaaagacaaaatgagtgtttctgtaaataaatatggaaatacttcagctgcgtcaatacctttaagtatcgatcaagaattaaaaaatggtaaaatcaaagatgatgatacaattgttcttgtcggattcggtggcggcctaacttggggcgcaatgacaataaaatggggaaaataggaggataacgaatgagtcaaaataaaagagtagttattacaggtatgggagccctttctccaatcggtaatgatgtcaaaacaacatgggagaatgctctaaaaggcgtaaatggtatcgataaaattacacgtatcgatactgaaccttatagcgttcacttagcaggagaacttaaaaactttaatattgaagatcatatcgacaaaaaagaagcgcgtcgtatggatagatttactcaatatgcaattgtagcagctagagaggctgttaaagatgcgcaattagatatcaatgaaaatactgcagatcgaatcggtgtatggattggttctggtatcggtggtatggaaacatttgaaattgcacataaacaattaatggataaaggcccaagacgtgtgagtccatttttcgtaccaatgttaattcctgatatggcaactgggcaagtatcaattgacttaggtgcaaaaggaccaaatggtgcaacagttacagcatgtgcaacaggtacaaattcaatcggagaagcatttaaaattgtgcaacgcggtgatgcagatgcaatgattactggtggtacagaagcaccaattactcatatggcaattgctggtttcagtgcaagtcgagcgctttctacaaatgatgacattgaaacagcatgtcgtccattccaagaaggtagagatggttttgttatgggtgaaggtgctggtattttagtaattgaatctttagaatcagcacaagctcgaggtgccaatatttatgctgagatagttggctatggtactacaggtgatgcttatcatattacagcgccagctccagaaggtgaaggtggttctagagcaatgcaagcagctatggatgatgctggtattgaacctaaagatgtacaatacttaaatgcccatggtacaagtactcctgttggtgacttaaatgaagttaaagctattaaaaatacatttggtgaagcagctaaacacttaaaagttagctcaacaaaatcaatgactggtcacttacttggtgcaacaggtggaattgaagcaatcttctcagcgctttcaattaaagactctaaagtcgcaccgacaattcatgcggtaacaccagatccagaatgtgatttggatattgttccaaatgaagcgcaagaccttgatattacttatgcaatgagtaatagcttaggattcggtggacataacgcagtattagtattcaagaaatttgaagcataactataaaaatcttcagtaacgttgttttagttactgaagattttttcagtttctttatactaagatgagcgacagcacaatcgtcataataaaatataaaatatttattaataataaggggattatccatgtagaaacaaagtaatgctctttttttacctcttgtgggttgaaaaatggatcatcagagatagacttcttctttttcgaagatgacatttgatactttaatcttctaaaaccataacttgtcgcatcaaaaatgccttcttgtacaagtaaaatcaaaaatatgctaataaaaataattaatgaaacataaaacaatatatttaaatatgtaatgatagtatggctattaaaaagccatataataaacgttaatattggcgttattagtgccattccaagccattttttcaacatttgatcactcccacttatagaaaactcttacgcatagtttacattaaaatcagacattgaggaatgattttttaatttcttcagctttattgaaattctaaaatcaatcattcttcattagtttaaagcaaaaaaatattgatatatagtaaatattgtatatataatattagttaagatttcagaaaattttgaagggaatggaaatttagaaatcggaatttgttagaggaggggattagatggggaaatatattttcaaacgatttatttatatgcttatttctttatttattattattacaattacatttttcttaatgaaattaatgccaggttcgccatttaacgatgctaaattaaatgctgaacaaaaagaaattttaaatgaaaaatatggattaaatgatcctgtagctacgcagtatttacattatttaaaaaatgttgttacaggcgattttggtaattcattccagtatcataatcaacctgtgtgggatttgattaaaccgagactactaccttcttttgaaatgggtcttacagcaatgttcatcggtgtgatactgggacttattttaggtgttgcagcagctactaaacaaaattcttgggttgactatacaactacagttatttcagttattgcagtatctgtaccatcttttgtacttgctgtacttttacaatatgtatttgcagttaaattaagatggttcccagtagctggatgggaaggtttttcgaccgcggtattaccgtcacttgcattatctgcagctgttttagcaactgtcgccagatacataagagcagagatgatagaggtattaagttcagactatattttattagcgagagctaaaggtaattcgacaatgcgtgtactttttggacatgcacttagaaatgctttaattccaattattacaattatcgttcccatgttagcaagtattttaacaggcactttaacaattgaaaatatttttggagttcctggattaggggatcaattcgtacgttcaattacaacaaatgatttctcagtaatcatggcaatcacactattatttagcacactgtttatcgtttctatttttattgtagatattttgtacggtgtgatagatccacgaattcgtgttcaaggaggtaaaaaataatggctgaaaataaaaacaatttgtcgattaacgacgatcattctaatgcagctatgacgcatacctctgacgctatcgcatcatctgattttattattagagaattagatttgaatcaggaacctgaaatgcaacgagaaagcaaaaacttttggcaagatgcttgggctcagttaaaacgaaataagttagctgttgtcggtatgataggtttaattatcattgtaatatttgcttttatcggtccagttataaataaacatgattatgctgaacaaaatgtagaacatagaaatcttccggcaaaaatacctgtattagacaaagttccatttttaccttttgatggtaaagatgcagatggcaaggatgcttataaagcagcaaatgctaaagaaaattattggtttggtactgatcagttgggtcgagatttatggacaagaacatggaaaggtgctcaaatttcattgtttatcggtgttgttgcagcgatgttagatatttttattggtgttgtatatggtgcgatttctggattcttcggtggacgtgtcgatacgattatgcaacgtatacttgaagtcatagcatctattccgaatttaattgtcgtaattttatttgtattaatttttgaaccatccatttggacaattatattggctatgtctatcacaggctggttaggcatgagcagagttgtacgtggagaatttttaaaattaaaaaatcaagagtttgtcatggcttcgaaaacattgggggcttcaaaattcaaattgatatttaagcatattttacctaatacattaggtgctatcgtggttacatcaatgtttacagtacctagtgctattttcttcgaagcatttttaagtttcattggtataggtgtacccgcacctcaaacatcgttagggtcattagtaaatgatgggcgcgcaatgttattaatttatccacatgaattatttataccagcaatgattttaagtttattaattctattcttttacttatttagtgatggattacgtgatgcatttgatccgaaaatgcgtaaataaaaagggggcatagcatatgactgaaagaatattagaagtaaatgatttgcatgtttcctttgatattacagcaggggaagtgcaggcagtgagaggcgtagatttttatttgaacaaaggggaaacattggcaattgttggtgaatcaggttcaggtaaatctgtaacaacaaaagcaattacaaaattattccaaggggacacaggaagaattaaaaagggagaaattttatttttaggggaagatttagcaaaaaaacctgaaaatgagttgattaaattacgtggcaaagatatttcaatgatctttcaagatccaatgacatctttaaacccaacgatgcaaattggtaaacaagtcatggaaccattaattaagcacaaaaattatagtaaagcacaagctaaaaagcgcgcattggaaatactaaatcttgtaggtttaccaaatgcagaaaaaagatttaaagcatatcctcatcaattttcaggtggacaaaggcaaagaattgttattgcaaccgcattagcttgtgaacctaaagtgctcattgctgatgaaccaacgactgcattagacgtaacgatgcaggcacaaattttagatttaatgaaagaactacaacaaaaaatcgatacagcaattatttttataacgcatgatttaggggttgttgcgaatattgctgatagagtggcagttatgtatggtggtcaaatggttgaaacaggagatgttaacgaaatattttatgatccaaagcatccatatacatggggattattatcgtcaatgcctgatttatcaacaacaaatgacacaccattactagcgattcctggagcgccacctgatttattacacccacctaaaggtgatgcatttgcgagacgtagtcaatatgcattagatattgattttaaagtagaaccaccgtggtttaaagtttcaccgacacattttgtgaaatcttggttattagacgcacgtgcaccaaaagttgaactacccgagctggtaaaacaacgtatgaaaccgatgcctaataattatgaaaaaccactcaaggtagaaagggtgtcgttcaatgaaaaatgatgaagtgctattatctattaaaaatttaaagcaatattttaacgcaggaaagaaaaacgaagtgagagcgattgaaaatatttcgtttgatatatacaaaggggaaacattaggtttagtaggagaatcggggtgtggtaaatctacaactggtaaatcaattattaaacttaatgatattacaagtggagaaattttgtatgagggtattgatatacaaaagattcgtaaacgtaaagatttgcttaaatttaataaaaagatacagatgatttttcaagacccatatgcgtctttaaatcctaggttaaaagtaatggatatagtagctgaaggtattgatatccatcatttagcaactgataagcgtgaccgaaaaaaacgtgtctatgatttacttgaaactgttggattaagtaaagaacatgccaatcgctatcctcatgaattttcaggtggacaacgccaacgtattggaattgcccgtgcattagccgttgaaccagaattcattatcgcggacgaaccaatatcggcattggatgtttcaatccaagctcaagtagttaatttattattaaaattacaacgtgaaagagggattacgttcctatttatagctcatgatctatcaatggtgaagtatatttcagatcgtattgcagtcatgcattttgggaaaatagttgaaattggaccggcagaagaaatttatcaaaatccattacacgattatactaagtctttattatcagccattccacaacctgatcctgaatcagaacgcagtcgcaaacgatttagttatattgatgatgaagcaaataatcatttaagacaattacatgaaattagaccgaatcactttgtctttagtactgaagaagaagcggcacaactacgagaaaataaattggtgacacaaaattaaggggaagggggaaatgcaatgacgagaaaatttagaacacttattttaattttgattgctacaattgcattaagtggttgtgctaatgacgatggtatttattcagataaaggtcaagtattcagaaaaattttgtcatcagacttaacatcccttgatacatcattaataacggatgaaatatcttctgaagtgactgcgcaaacattcgaaggtttatacacattaggaaaaggtgacaaaccggtgttaggtgttgcgaaagcttttcctgaaaagagtaaagatggtaaaactttaaaggttaaattaagaagcgatgctaaatggagcaatggtgacaaagtgactgcacaagactttgtttatgcttggagaaaaacagttgaccctaaaacaggttctgaatttgcatacattatgggggacattaaaaatgcgagtgatattagtactggtaagaaacctgtagagcaattaggtatcaaagcattaaatgatgaaacattacaaattgaattagaaaagccggttccatatattaatcaattattagcacttaatacctttgcacctcaaaatgaaaaagttgccaaaaaatatggtaaaaattacggtacggcagctgatagagcggtatacaatggtccatttaaagttgatgattggaaacaagaagataaaaccttactatctaaaaatcagtattattgggataaaaagaatgtaaaattagataaagtgaattataaagttattaaagacttacaagccggtgcatcattgtatgatactgaatcagtagatgacgcagttattactgcagatcaagtaaataaatataaagacaacaaaggattaaactttgtgttaacgactgggacattttttgtaaaaatgaatgaaaaacaatatcctgattttaaaaacaaaaatttaagattggctatcgcacaagcaatagataaaaaaggatacgttgattcagtgaaaaacaatggctcaattccttccgatacactaacagccaaaggaattgcgaaagcgcctaatggcaaagattatgcgagtaccatgaattcgcctttaaaatataatcctaaagaagcaagagcacactgggacaaagctaaaaaagagttaggtaaaaatgaagtgacattttcaatgaacacagaagatacaccagatgcaaaaatatctgctgaatatatcaaatcgcaagttgagaaaaatttaccaggagttactttgaaaattaagcaattaccgtttaaacaaagagtatcactagaactgagtaacaattttgaagcatcacttagtggttggtctgcagattaccctgatcctatggcttatttagaaacaatgaccacaggtagcgcacaaaataatacagactggggtaataaagaatatgatcaattacttaaagtagcaagaaccaaattggcacttcaaccgaacgaacgatatgaaaacttgaaaaaagcagaagaaatgttcctaggagatgcaccggtagcaccaatttatcaaaaaggtgttgcacatttaacaaatcctcaagtaaaaggattaatttaccataaatttggtccaaataactcacttaaacatgtatatattgataaatcgatagataaagaaacaggtaagaagaaaaaataatatgctttgtaaattaggctggagacatatctccagtctttttgtgttggataaaaactttgggaataaaaatttaaaataagtcgttttttaaattactgaaattgattaaatgcataaataactgaatattctaaaaataaacttgtaataattttttctatgagtaaactaaaaagaaaaaattagattgaaagtaggaggcatatgtatggggaagctaattaaatatatttcaatacttcttattgtcgttttagtgttgagtgcttgcggaaaaagcagtaataaagatgaaggagtaaaagatgctactaaaacggaaacctcaaaacataaaggtggtaccttaaatgtagcattaacagcaccgccaagtggtgtttattcttcgttattaaatagtacacatgcagattctgtagttgagggatattttaacgaaagcttattagcaactgataaaaaaatacgtcctaaggcatatattgcttcatggaaggacatcgagccggctaagaaaatagaatttaaaattaaaaaaggtattaaatggcatgatggtaatgaattgaaaattgatgattggatttattcaattgaagtcttagctaacaaggactacgaaggtgcttattatccaagtgtagaaaatatccaaggtgcgaaagattatcatgaaggaaaaactgatcatattagcggattgaagaaaatagatgactacactatgcaggttacatttgataaaaaacaagaaaattacttaacaggatttattactggacctttattaagtaaaaaatatttatcagatgtaccaattaaagatttagcgaaatcagataaaatccgaaaatatcctattggtattggaccgtataaagttaagaaaatcgttccaggtgaggctgttcaactcgttaaatttgatgattattggcaaggtaagcctgcactagacaaaatcaatttaaaagttattgatcaagcgcaaattattaaggcaatggaaaaaggcgatattgatgttgcgaatgatgctaccggtgcaatggcaaaagatgctaagtcatctaatgctggtctcaaggtattatctgcgccaagcttagactacggtttaataggattcgtatctcatgattacgataaaaaagctaataaaactggtaaagtgagaccaaaatatgaagacaaagaattacgtaaagcaatgctttatgcaattgatagagaaaaatggatcaaagcgtttttcaatggttacgctagtgaaatcaatagttttgtaccatctatgcattggatagcagccaatcctaaggacctaaatgattacaaatatgatcctgaaaaagctaaaaaaatcttagataagttaggttataaagatagagatggtgacggatttagagaagatcctaaaggtaataaatttgagattaactttaaacataattcaggttctaatcctacttttgaaccaagaactgctgcgataaaagatttctgggaaaaagttggcttgaaaacaaatgtgaagttagtagaattcggtaaatataatgaagacttagcaaatgcatctaaagatatggaagtgtacttcagatcatgggcaggaggtacagatccagatccatcagatttataccacactgatagacctcaaaatgaaatgagaacagttttaccaaaatcagatcaatatttagatgatgcattagacttcgaaaaagtaggcattgatgaaaagaaacgtaaagatatttatgttaaatggcaaaaatatatgaatgatgagttacctggattaccaatgttccaaggtaaatcgataactattgttaacgataaagtacgaaacttagacattgaaattggaactgatcaaagtttatataatttaactaaagaagcttagtaatgtaacctcgacgattttgtcgaggtttacttatatggggggatgttatgaataatgtattgttagaggttaaagatttagaaacatcattaaaaataaataatgaatggttagcaactgttgaaaatatttcttttgaattatctaaaggagaagttttgggtatagtaggggaatctggttgcggtaagtccatattaagtaagtcaattattaaattattaccagaaaagatatctaaactaagtaatggagaagttatatttgatggtaaacgaatcgatacgctcaatgagaagcaattgctagatattcgaggaaatgatattgctatgatttttcaagaacctatgactgctttaaatcctgtatttaccataaaaaatcaacttgtggaatctataaaatcacataaaaaaatttctaaaaaagaagcaaataaattagcaaaagatttactaaaaaaagttggaattgctagacaagatgaaatattaaatagctatcctcatcaattatctggtggtatgagacaaagagtaatgattgcaatggccatttcatgttctcctaaattattaattgctgatgaacctacaacagcattggatgtcacgattcaagcgcaaatattagacttattaaaagaattgcaaaaggaaacgcaaatggcaattatgatgattacacatgatttgagtgtagttgctgagttttgcgataaagtcttagttatgtatgcaggtcaaattgtagaatttggaggcataaaagaaatactacacaatccgaaacatccttatacccaaaaattattatcaacaattccaaaacttaaagaagagcagaaacgacttgaaacgatagaaggaattgtgccatcaatccaagcatttcacgttaataagtgcagatttgcaaatagatgtaacaaaaaactggatatttgtaataatcaatctcctaaaatgcatgtttgtgaagacgtcattgtacgttgtcatttgtacaaaaatgaatataaggagatataagaatggaaaatattttagaagtcaaccaaataaaaaaatactacaaaattaaaactggattattacaaaaaactcagtacgttaaagctgttgatgacgtatcgttttcaataaaaaaaggacaaacttttggattagtaggagaatcgggttgtggtaagtcaacgttaggtaaagtgattatcaggcttgaagatgcaacttcaggctcaataattgttaatggtgaagatataacaagattacaaggtaaaaaactcagaaaatcacgacaacaatatcagatgatatttcaagatccgtatgcatcattgaatccgatgcaaatggttggagatatcatttcagaacctattttaaattataaaaaattgccaaaagaagaaataaaaaaagaagtactatatttattaaaatgtgttggcctaagtgaagatgcatattataaatatgcacatgaattttcaggtggacagagacaaagagtgggaattgcaagagcattggctttgcgtccgagtttaattgttgctgatgagcctgtaagtgcattagatgtatctgttcaatctcaagtactgaatttattaaaagatttacaagaacaatttaacttaagctatttatttatcgcacatgatttaagtgtagtaaaacatataagtgatgtcattggagttatgtatttaggtcatatagttgaaatcgcatctgataaagaaatttatgaaaatcccaaacatccatatacaaaagcgttgatttcatcaataccacaaattgataaacataataacaatagaattatattaaaaggagaattaccttcgccaagtaatccgccgcaaggttgtccttttcatacaagatgtccaattgctcaagatatgtgcaaaaaaagtatgccagaattaaaggacattggtaatgaacatcaagttgcttgtttctacgtagataaagtaggtgatttaaatgattaaattaatacttaaaagattagggttaatgatcccgttactaattttaatctcaatagttgtattttcattagcaatcatacaaccaggagatccattttcagatctacaaaacggtaaaataaaacaagaagcaataaatgcacaaagggaaaaattaggtctcaacgactcaataccacatcaatacattagatgggtcaatcatgttatacacggtgatttaggggagtcaatcaaatataaaaggccggtaattgatgttattgaggaaagaattccaaatacaatattactcggtgctatgtcattaattattacttatattatctcatttgctttaggaataacgtcaggtagatattcttacagtttgacggattatactgtgcaaatatttaattatttgatgttagccattccatcttttattgcgggagtatttgcaatttttattttttcttttgaattacaatggttcccgtttcaaggttctgttgatattaaccttaaagaaggtacttttgaatattatatgagtaaaatatatcacacatttttacctgcattcactttaggtttattatctactgctggttatattcaatatttacgtaatgatattattgaaaattctaaaaaagattatgtattgacggcaaggtcaaaaggattatctatgaataaaatttataataaacatatattgagaaattctctaatacctattattacatttttaggtgctgatattgtaagtattttaggtggagccgtgattacggagactatcttttcatataacggtatcggtaaattatttttagaatcggtaataggccaagactatccattaatgatggcattaacgttatttttctcatttttaggtttactgggtaatttgatttctgatattacttatggatttatagatccaagaattagaagtaactaggggggattagaatgcaaaataagtcaaaatcgccttttaaaattgcattttctaaatttattcataataaaattgcaatgttatcggttatttttttattaatcataactattgtatcaattatagcgccattaatagctccttttccagtgaaccaacaagatttattaaatataaaaggtgaaatgacagcacaaaacattcttggtacagactctggtggtagggataactttagtcgtttgttatatgcaggtcgtatttcattatccattggaattacatctacaataggaatgcttttgattggaattacagttggagtgatttctggttattttggaggtattgttgatacattattaatgagaataaccgaatttgttatgttatttccatttttaatatttgcaattgtattaaatgctgcacttggagataaaattaaaaatccttatggatctgccataattcttgttctagttattatcgtattaagttggggaggtattgcaagacttgttcgtggtaaagtacttcaagaaaaagaaaatgaatactttttggcagcaaaatcaattggtacacccacatataaaattattttgaaacatcttttgccgaatatattaagtgtagttatcgtacaagcaacattgttatttgccggtatgattgtagtggaatcaggattgagctttttaggattcggaattagtaaagcaataccatcttggggtaatatgttgagtgatgctcaagaaggggatgttataagtggtaaaccgtggatatggatgccacctgctataatgattacattaactatattaagtataaactttgtaggggaagggattaaagatgcttttaatcctagaggtagacgttaaataataaaagaggcactagttaattctagtacctctttattttatctcttacgtcctaaacccatcgctttttccatttttttgacagttttaaatgaaactttgtgtgctttatctctaccttgatctaaaatatcatcaagtttatctgagttatagaaactttcgtatttttcttggaattctactaaaaatgctttaactatttcagcaaggtcacctttaaatttaccataaccttcgccctcatattttgcctcaatatctttaattggcatgtctgttaatccagcgtatattgaaattaaatttgttatacctggcttgttgtcacgatcaaatttaataataccatctgaatcagttactgcgcttttaatttttttagctgcaacattcggctcgtctaataatgaaatgaagtttttagcattatcatcactcttactcatttttcttgttgggtcttgtaaactcatgacacgtccaccaactttaggcatacgaatttcaggtttcacaagcacatcattatagcgactattaaatctatctacaaggttacgagtcaattcgatatgctgcttttggtcatctccaactggaacgatattagtattgtaaagaacaatatcagctgccattaaaggtggatatgttaatagaccagcaggtataccttcaactgctttctgagctttatctttgtattgcgtcatacgctctaattctccaacagaagcaatcgtagttaacatccatcctgcttgtacgtgtgcagggacttcagattgtatgaacaatgttgctttgtctggatctataccagaagctaaataaatcgctgctaattgtctggtctgtttacgtaattttaaacgatcttgtggcattgtaattgcatgttgatctacgatacagaaataacaatcatagtcattttgcacatcaacaaattgttttagtgcgccaatataatttccaatagtaggaattccactaggttggatgcctgaaaataatgtctccatttaaatgcctactttcttagtaatattttaataattatcattataacagtatttcttaaaaatgtaagatgtgttagaatatacgtataacttactactaacaaagggattaataatcttttttataagtgtagaaacttatctgaaaaattaggtttttctcatttaattttaatgttagatagttataataaatagtaacgattaagaattttagaaaaaaatgttttttcttgatctataactaaattttaagcaatgaattttattcattcaaataggagagtgagatgtatggtaacattatttacttcaccaagttgcacatcttgccgtaaagcgaaagcatggttacaagaacatgacattccgtatacggagcgtaatattttttctgaacatttaacaattgatgaaattaagcaaatattaaaaatgactgaagacggtactgatgaaatcatttctacacgttctaaaacataccaaaaattaaatgttgatattgattcactaccattacaagacttatattcaatcattcaagataatcctggcttattacgtcgtccaattattttagataataaacgactacaagttggttataatgaggacgagattcgacgtttcttacctagaaaagttcgtacgttccaattacaagaagcacaacgtatggttgactaataaccatttaactatgtgtcatactttactaaaagatatgtcaagcaacactatttctatagtgttgcttttttggttttaattttacaataattgcttagtatcttttaaatcaaatgtgcaattgttaatatagctctatattagagtgttttggatgaaacatttgctatgataaggtaaaattaaattaagaaagtgctttaatgctttaactgtataaatcatttaaatagttttgctacaacgaatatgttattataagttaccaaaatattttagagaaagaaatcaaacaaataaattgtattttgtttgatgctttaatacaatgtggatactattcatcgactgtaaggagtgagatgatatgagaatagaacgagtagatgatacaactgtaaaattgtttataacatatagcgatatcgaggcccgtggatttagtcgtgaagatttatggacaaatcgcaaacgtggcgaagaattcttttggtcaatgatggatgaaattaacgaagaagaagattttgttgtagaaggtccattatggattcaagtacatgcctttgaaaaaggtgtcgaagtcacaatttctaaatctaaaaatgaagatatgatgaatatgtctgatgatgatgcaactgatcaatttgatgaacaagttcaagaattgttagctcaaacattagaaggtgaagatcaattagaagaattattcgagcaacgaacaaaagaaaaagaagctcaaggttctaaacgtcaaaagtcttcagcacgtaaaaatacaagaacaatcattgtgaaatttaacgatttagaagatgttattaattatgcatatcatagcaatccaataactacagagtttgaagatttgttatatatggttgatggtacttattattatgctgtatattttgatagtcatgttgatcaagaagtcattaatgatagttacagtcaattgcttgaatttgcttatccaacagacagaacagaagtttatttaaatgactatgctaaaataattatgagtcataacgtaacagctcaagttcgacgttattttccagagacaactgaataacgatattaattaagcaacgcactatgaaaggagactctttggagtctctttttttattgatttcaaaagctgaaaaagtaatagtagttaaacttacgtgtaatattttgaggtgaagatatgttagtagctttaaatgaagaaaaggaacgcgtattagcaactactgcattgagaaagacacaatatttttgtccggtgtgtggcaagcaagttattttaaagcgtgggctcaaagtaattagtcattttgcacataaacatttagcggaacaaaaatgttttaataatgaaacgattaaacattataaaagtaaattgattttagcacagatgatacagcaacaaggatgtaaagtagagatagagccatttttaaaagaaataaaacaaattccggatattttgattaataataaatatgttattgagctacagtattcgccaattccttataaacagattcttcaacgaacggaaggtttaaagaaaatgggatataaagtaagttggttattaaatgatgttgattattgtcataataaagtgaagttcaatcattttcaaagtatgtttattaatccattcactcgaaaacttcatacgttcaatttagagaaaaaacaaataatgatgtttcaacaaatacaatatttaggcgggcacaaatatgtcgctgaaaaaagaaatgccaaaattagtgagttgtttaatgaggcgccttgtgattatcatgctgtttataaattatcaaagttcgcaattaatcaatatatcaaatattgtcgctggcaaaattctgttttagaacccactttaagtgcaatgtatcaattacagttaactgatcaagaagtagtgcacaattatggttatatttttccagagcaaatttatattaaaaatcatcctattgagtggcaattacaagttgatttatggttaaagaatggaaaaagcaaattagtaaatgacaatcttaattattttaaactgaaaaaatttattgttgctctagaaagtaaaacagcaattatagaaaaacttattaacaattatttaaatatttgttcagataaaggtaatgacgtgcaaattttgttctaaaatgagaaaattatatcaattatattttattaggaggtttactacatatgagtcaacaattatcgagagaagaacaggaacgtaaatatcctgaatatacatgggacttaacaacaattttcaaagatgatgaagcttttgaggctgcatttaaagaagttgaaaatgagttaggcaaagaagaacaatttaaaggacacattggtgatagtgctgagacattatacaatgcgttagaattagaagatacattaggtactaaattagaaaaagtatatgtatacgcgcacctaaaacaagaccaagatacaacgaacgacaagtatactggtatggagtcaagagcacatcaattaattattaaatttagctcggcatggagtttcttagtgccagagattttacaaattgatgaagataaaattcaatcatttgtaaattcatatgataaattacaaaaattcgcatttgatttgaagttgattaatgaaaaacgtcctcatattttagatgctgaaactgaaaagttattaacagaagcgcaggacgcgttatcaacgccatcaaatgtatacggtatgtttagcaacgctgatttagtatttgaagatgcgatagataaagatggaaatgcacacccgttaacacaaggtacatttattaagtatttagaaacagatgatcgcaaactaagagaaagtgcttttagaaatgtatataaagcatatggtgctcataataatacgcttggcgctacgctagcaggtgaagtgaagaaaaatgtatttaatgctcgtacacacaattacaaaactgcaagagaaaaagcattgagtaataatcatattccagaaaatgtatatgacaatctagtaaaaactgtacataaatatttaccattgctacatagatatactgaattgcgcaaagaattgctaggtttagatgacttgaaaatgtatgatttatatacaccattaattaaagatattaagtttgaaatgccttatgaagaagctaaagagtggatgttaaaagcattagaaccaatgggtgaagaatatttaaatgtagttaaagaaggcttaaacaatcgttgggtcgatgtctatgagaataaaggtaaacgttcaggtggctattcatcaggtgcacatttaactaatccatttattctacttaactggtctaatactatttcagacttatacacattagttcatgaatttgggcattcagcacatagttacttcagtagaaaattccaaccgtcaaattctagtgactacactatttttgtcgctgaagttgcatcaacttgtaacgaagcacttttaagtgattatatggataaacatcttgatgatgaaaaacgcttattattattaaaccaagaattagaacgtttcagagctacattattccgacaaacaatgttcgcagaatttgagcataaaattcatgcaattgaagaagcaggtgaaccattaacgccaactagaatgaatgaagaatatgccaaattaaataaattatacttcggtgattctgtagaaactgatgaagatattagtaaggaatggtcacgtattccacacttctatatgaattattatgtatatcaatacgcaactggttacagtgcagctcaaagcttaagtcatcaaattttaacagaaggtaagccggcagtagatagatatattaatgaattcttgaaaaaaggtagctcaaattatccaattgagatattaaaaaatgctggtgtagatatgacaacacctgaaccaattgaacaagcttgtgaagtttttgaacaaaaattgaacgcttttgaaaaattaatgaaagcttagtactattgtattcgcttacattatgaacagattgtgacaatttaaattaagtactattaaaaggttgaaatggtagagatagcatgttatattatgaacatgaaattaatcacataacaaacatacccctttgtttgaagtgaaaaatttctcccatcccctttgtttagcgtcgtgtattcagacacgacgtttttttatgttcttttttaataagagggaagtgaagttgtataaaaatgtattaaatatgcactttttatacattaacgattcatatatgtctattatgtaccaaatttataatttgtataattttcgaactggttaaattcgaaaaatatcactaatatatttagatcgatgtgtaacattacgttctaataatttaatgttgcaaaattaagagtcagtaaaaagacctcgttacatttatggtgtacgaggtctttaatttatttattttgatttgattttaggcattttagatttccagaaatcgccatctggatatttaagtttttcaattttttgttgaatggctaacttctttaactctttgtttaaaagtttttctggccattcataaatagtaagtaattcttccatcgttacaagttgttgttgctgtatataagtttctaatttaggaggaagattcttttcgataggtttacccatcaattcattaattatataagtatagatgtgatatgggtataatccttcgacttttaaaccttcttcatgaacatcttcactaaagaaaacgagagaaggggcttgttcgatttccatttctcttgcaatatgcaaatcaattttcaagctttcggttagtttacttttttgtaagtcgtctttaaatacttctaaatcaatacctgcattttgaatacagtcacaaatcattgattctgtaataatatctcttttaggtatgatttcattttgcattaaatgtataaatcgttcggcacgtacacgaccttgtaactcagctgctttataagctagggcgatgttatcaaagttggatgtactttgagcttggcatttcgttaatacttttaacgaaggatttaatatatgtctgatacgtatatattgattatattcaattcttaatttggataagattgctgataatttgaagcaatcggagctaaatggatcgaaaaatgaataaatttcgattttacttacaggtgatagattgatatcttcacgactcttattttccattattcgtaattctccagccatgtttattcacctacaattaattttaggaattcaccatatgattagcagttaatcttaagcgctcaaataaataatctccaacaccttgtggaaacgcagcgcgattaattgctgtctgcatattttctaaccatgcatctctttcaaattcagtgattgtaaaatctatatgtctttttcttagcataggatgtccgtgttcttcggtataaatgtttggaccgcccaaaaactgtgttaaaaattgtttttgtttacgacttgtttctgcaaaatctcctggaaacaggtgattaagtcgttcatctttttctacaagggtgtaaaaataatcaatcatatcgtataacgcttctttaccaatgatgtcatatggtgttgttgtcatttaatcacccattttcaaaaatttactgttacgaacttaagttaatatataactaatataacatgattttaaacatttgaaagaaatatgcatatttgccaatttaatttatattgtttgaaagtgtttcttttttcttgaaaaaacgttgaactttatttaaaggttgatgatgttcgaggtttagttcgtttaataaagattggaacttttgtaaaccttgattatagtctttaacttcgaactctaactcataatccgtagtatcgaaatactcacttttatctaaaaccagtaaatcacctttatatttagtttcttggcgatatgtcgttaatgcaccaagtattgataaagttgtatcttttacaccaaactgttcaactataatttgacgaatgtcatctggaagattgtcgtttgaaataatcaagttcatctctggtttaatgtcgacgatatagttgtattctaatagaccaacctttgctggtgtctttaaagtcatttcatattgattgtctttaactcttatgcgtagtgcagagcgatgttcctttaatttgaaatcgggtgtatcaatatagtaattgacttgcttaaaaagcacactgtctttaaaatatttctcttgcaatttattatagattgatgcagttatcatttgtttaaattctatttcatgatttgttgccatgatatgtatacacctcgtatcaaattcaatttatcttaactatattatgaatgacaaagttgaattttaaaagtaatttcctttatctattatcaatgttaatttgaccattaaaaatagtgttcgtaagtgttttgtattattgaattgtgttaaaatgttatggaataagaggaggattaagcatgcgtttatatattaatgaaattaaaattaaagatgacatactttattgttatacagaagattctattaaaggattatctgaagtaggacaaatgctcgttgatagtgataattatgcctttgcgtatacattagatgatggtaaagcgtatgcttatctcattttcgtacaagaaacatggacgatgttgcatgaaaacatgactaaaaaaattattatcaatgatgaactagaattgactgaattccaccaagaacttacttatattttagacaacataaaagggaataataattatggtaaggaatttgttgcaaccgttgaagaaacattcgacattgaataaagcggggtgaagcactatgaatcaatgggatcagttcttaacaccttataagcaagcggttgatgagttgaaagtgaaacttaaaggcatgcgcaaacaatatgaagttggtgaacaagcgtcgccaatagaatttgttactggtcgtgttaaaccaatcgctagtattatagataaggcaaacaaacgacaaataccatttgataggttaagagaagaaatgtacgatatcgctggtttaagaatgatgtgccaatttgttgaagatattgatgttgtcgtcaatattttaagacaaagaaaagattttaaagtaattgaagaacgagattatattcgtaacactaaagaaagtggttaccgctcgtatcatgtcattattgaatatccaattgaaacattacaaggccaaaaatttatattggctgagattcagattcgtacattagcaatgaatttctgggcaacgattgaacatactttacgatataaatatgatggtgcttatccggatgaaattcaacatcgtttggaaagagcggcagaagcagcgtatttacttgatgaagagatgtctgaaattaaagatgaaattcaggaagctcaaaaatattacacgcaaaaacgttctaaaaaacatgaaaatgattaacgaggtgttataaatcatgcgttatacaattttaactaaaggtgactccaagtctaatgccttaaagcataaaatgatgaactatatgaaagattttcgcatgattgaggatagtgaaaatcctgaaattgttatttcagttggtggtgacggtacattactacaagcattccatcagtatagccacatgttatcaaaagtggcatttgttggagttcatacaggtcatttaggattttatgcggattggttacctcatgaagttgaaaaattaatcatcgaaattaataattcagagtttcaggtcattgaatatccattgcttgaaattattatgagatacaacgacaacggctatgaaacaaggtatttagcattaaatgaagcaacgatgaaaactgaaaatggctcaacacttgttgtggatgttaacttaagagggaaacactttgagcgatttagaggcgatggattatgtgtatcaacaccttcgggttcaacggcttataacaaagcgctaggtggcgcactgatacatccttcacttgaagcaatgcaaattacagaaattgcctcgataaataatcgtgtgtttagaacggtaggatcaccacttgtattaccaaagcatcatacatgtttaatatcaccagttaatcatgataccattagaatgacgatagatcatgttagtatcaaacataaaaatgttaattcaatacaataccgtgtagcaaatgaaaaagtgaggtttgcacgttttagaccattcccattctggaaacgtgtgcacgattctttcatatcaagtgatgaagaacgatgaaatttaagtatcatatatcacaacaagaaactgttaaaacttttttagcacgacatgatttttctaagaagacagtgagcgccattaaaaataatggcgctttaattgttaatgatgaaccagtcacagtgcgtaagcaattaatgacaaatgatatattagaaattcatttaccgcgagaaataccgagtgttaatttaataccttatgctcgtaagctagaagtattgtatgaagatgcttttatcatcatagttactaaaccaaacaatcaaaattgtacgccttcgagagaacatcctcatgaaagtttaatcgaacaagtactatatcattgtcaggaacatggtgaaaatattaacccacatattgttacgcgtctagatcgtaatacaactggtattgtgatattcgctaaatatggacatatccatcatttattttctaaagtaaacttgaaaaaaatatatacttgccttgtatatggtaaaacccatacatctggtattattgaagctaatattagacggtcaaaggataggattataactagagaagttgcctcggatggtaaatacgctaaaacatcttatgaagtaataaatcagaatgataaatacagtttatgcaaagttcatttgcatacgggacgtacacatcaaattcgtgtacattttcaacatattgggcatccaattgtgggagattctttgtatgatggttttcatgacaaaattcatggtcaagtactgcaatgtacgcaaatatattttgttcatccaatcaataagaacaatatttatattacaattgattataagcaattacttaaattattcaatcaactctaattcacacagggggtgtaagtatgtcaatgaacacagatgaaaaagagcgtgttcaagaggaattatacgaccaaactttattagatcaatatttagaaaatgatgatattgatcaatttagagatgaatttctagcattacacacatatgaacaaagtgagtattttgaagatactaccgatgaaaatagacaaaagatttttcaatatttatcacctgaagaagttgcaaatttctttgatcaattagatattgatgacgatgaatatgagttgctatttgataagatgaatgcgacatacgcaagtcacatattagaagaaatgtcatacgacaatgcagtagatattttaaatgagttgactaaaccaaaagttgctagtcttttaacattgatgaataaagatgacgcgaatgaaatcaaagcattacttcactatgatgaggatacggccggcggtattatgacgacggagtatttatcacttaaagcgcatacgcctgttaaagaagcattattattggtcaaagcgcaagcaccagacgcagaaacaatatatgttatatttgtcgttgatgatgatggtaaattagtaggtgttttatcgctaagagatttaattgtagctgaaaatgatgcttatattgaagatattatgaatgaacgtgtcattagtgtgaatgtagcagacgaccaagaagatgttgctcaagttatgagagactatgatttcatggctgtacctgttatagattaccaagaacatttgcttggtatcatcacgattgatgatattttagacgttatggatgaagaggctagtgaagactactctcgtttagccggggtatcagatatcgattcgactaatgattcaatcattaaaacagcattaaaacgtttaccatggttgattattttaacatttttaggaatgattactgcgacaattttagggagattcgaaaaaacattagaaaatgtagcgctactcgcagcgtttattcctattattagtggtatgtcaggaaattcaggtacacaatctttagccgtttcagttcgtaacattacgacaggggaaattaatgagcaaagtaaatttagaattgcattaagagaagcaggaagtggtgtattatcgggtgttgtatgttcaacaatattatttacaattattgttgcaatatatcatcagccacttttagcattaatcgttgcaggaagtttaacttgtgcgatgacggtggggacgtttgtaggttcgatgattccattattgatgaataaattaaatatcgatccagcagtggctagtggaccatttattacaacaattaatgatattattagtatgttgatttattttggtttagctacatcatttatggcttacttaatttaaggaggagttatggagtttttatctttagttattgttgttttagcagcgtttttaactccaataattgtcaatcgattaaatattaatttcttgccagttgttgttgcagaaattttgatggggattgtgattggaaattcatttctaaatatagtagaaagggattcaattctaaatattttatcaacgttaggctttatctttttaatgtttttaagtggtttagaaattgattttaaagcttttaaaaaagataaacgcgcacgtcaaggacaaaatgatgatgaatcctcaattccagggcatcttaatctagcgttaactgtatttgcatttattatgattatttcgattcttttagcgtatgtatttaaatggcttggattagtggatgatgtgttattaatggtcattatcatttcaactatttccttaggcgtagttgttccaactttaaaagaaatgaatattatgagaacaactatagggcaatttatcctattagtagcagtacttgcggacttagtaactatgattttattaacggtctatggcgcaatcaatggtcaaggcggcagtacaatatggttaataggtatattagttgttttcacagcaatttcatatattttaggtgttcaatttaaaagaatgtcatttttacaaaaattgatggatggtacgacgcaaatcggtattcgtgcggtatttgcattaataatattattagtagccctagcagagggagttggcgcagaaaatatattaggtgcattcttagcaggtgtcgttgtttcattattaaatccagatgaagaaatggttgaaaagttagactcatttggttatgggttctttattcctattttctttataatggttggtgtagatttaaacataccttcattaattaaagaaccgaaattactaattatcataccgattttaatcgttgcatttatcatttcaaaattaattccagtcatgtttattcgacgttggtttgatatgaaaacaacgattgcatcagcatttttattaacatcaacattatcgctcgtgatagctgcagccaaaatttcagaaagattaaatgctatttcagctgaaacgtcaggtatattaattttaagcgcagtcattacatgtgtattcgttccgattattttcaaaaaactgtttccagttccagatgagtttaaccgtaaaattgaagttagtttaattggtaaaaatcaattaacgattcctatagcgcaaaatttaacatctcagttatatgacgtgacattatattatcgcaaagacttgagtgatcgtcgtcaattgtcagatgatatcacgatgatagaaattgctgattatgaacaagatgttttagaacgactaggtctgtttgaccgagacatagttgtttgtgctacgaatgacgatgatattaaccgaaaagttgctaaattagccaaagcacatcaagttgagcgtgtcatttgcagacttgaaagcacaacggacgatacagagttagttgattcaggtattgaaattttcagtagctacttaagtaataaaatcttattaaaaggtttaattgaaacacctaacatgttgaatttattaagtaatgttgaaacgtcactatatgaaattcaaatgttaaattataaatatgaaaatattcaattacgtaatttcccattcggaggagacatcatcttcgtgcgtattatccgtaataatgagtcgattgttccgcatggagatacacaattgcgatatggagatcgcttaattgttaccggtgctaaagaatacgttgatgaattgaagcaagagttagaattttatttttaacaataatgatattaaaatgcagacgtattttagtacgacgtaaaattaatgattttaaaatgctagtatgtatatgattttgataaataaatgctttttacgtaaatcaagtttgatacagaaaggactaaatcaaacatttatcgttgtaatacgtttaaataactttattaaaaagtcataattgtgttaaaatgtattgacgaataaaaagttagttaaaactgggattagatattctatccgttaaattaattattataaggagttatcttacatgttaaatcttgaaaacaaaacatatgtcatcatgggaatcgctaataagcgtagtattgcttttggtgtcgctaaagttttagatcaattaggtgctaaattagtatttacttaccgtaaagaacgtagccgtaaagagcttgaaaaattattagaacaattaaatcaaccagaagcgcacttatatcaaattgatgttcaaagcgatgaagaggttattaatggttttgagcaaattggtaaagatgttggcaatattgatggtgtatatcattcaatcgcatttgctaatatggaagacttacgcggacgcttttctgaaacttcacgtgaaggcttcttgttagctcaagacattagttcttactcattaacaattgtggctcatgaagctaaaaaattaatgccagaaggtggtagcattgttgcaacaacatatttaggtggcgaattcgcagttcaaaactataatgtgatgggtgttgctaaagcgagcttagaagcaaatgttaaatatttagcattagacttaggtccagataatattcgcgttaatgcaatttcagctagtccaatccgtacattaagtgcaaaaggtgtgggtggtttcaatacaattcttaaagaaatcgaagagcgtgcacctttaaaacgtaatgttgatcaagtagaagtaggtaaaactgcggcttacttattaagtgatttatcaagtggcgttacaggtgaaaatattcatgtagatagcggattccacgcaattaaataatatcattcaacagctttgttcacgttattatatatgtgagcaaagcttttttgcttttataataatcggactgatggaaaattatttgatatttcatttgattgattttttatgcacaaaaaaatcgcctcaaaagctgtagtttcaacttttgatgcgatagtatcttatattcttaaaagacatccacagaattagtccttaacattactgtttgctttatcaataatgcgttggcggtatttgaaaatattactaacaaccgttttaagtacagcatataatggcactgcaatcagaactaatgtaaagccacctaaatctcctgctgctaaaataacaacgataattgttaaaggatggatacttaaagatttacccattacatttggtgtaatgatattaccttcaagttgatgtgcaattaatgtaatgatacaaacccatataaatgtagtaggactatctataataccgagtattgctgcaggtgcaaatgataaccatgaacctaagaaaggaattaagtttgcgacaccagcaaatagtactaataaaggaatatatggtaagtcaataattgaataaccgatatataagaatatacctaaaataacactgacagttacttgaccttgaatgtaagattttaatgtaaagtttaaatcagttaataaatctacgaaaaatactttacgttcacctttgaaaaatttagcaacagctgggataaatttttcatggtcttttaacatataaattaagaagaatggaaccataatcaataagaagatggttgaaattaatgatgtaatgtactgtaatgaattagataaaatattagtaacgccatcacccattgatttaaccatatttgtaattctacttgttacatcttcaggtaatttatccatttgagctagtgcgaatttaataatttgctctgcttctttttgtagggcaggtgtctgactaattaaattgttgatatttgaaatgatgattggtgcaacaaacgcaacaattaagccgataatagcaaacaaagctaacatgattgttgttatactagcccatcttggaaaaccgactttttcaagtaagttttgaaaaggtagacagatataaaataaaaaaccactaattaaaaatggaagaaatacagaaccgatgattgtagctattggagtaaatacttcgtgcacttccataaatagtttgatgagaatgaacagcataatcagagcgatgccagttcggaaccaaaccttgtttaacataaacgatgttcctcctatttttctaaacttagttattatttagtatatcctaaatagcagtgcttaaaaaggttaatattttttaaatatacttaaattaaccattcactttctattttaagatatttactttcaatagtttgtgagacttttcaatgactcgtaagtctgcaattggatcaaacagcaccagtttatatgaataacttattttaatattaaacgtgtttaaatagtgaaatgatcatattaatatttataagaatattctgaaaaatatattgaagtgtctcgtgcttaatcgtataatatttttatgtttaaacaatagggggaatcttatgattgaaaaattagtaacctttttaaatgaggttgtttggagtaagccattagtttatggtttgctaattactggtgtgctatttacattgcgtatgcgattttttcaagttagacattttaaagaaatgattcgattaatgtttcaaggagagaagtctcctaatggtatttcaagttttcaagcgatagccatgtctttagcaggcagggttggtacaggtaatattgtcggtgtatctactgcaatatttataggaggacctggtgcagtattttggatgtggattactgcgtttttaggtgcaagtagtgcttttattgaatctacacttggtcaaatattcaagagagttgaaaataatgaataccgtggtggaccagcgtattatattgaatatggtattggtggtaaatttggtaaaatttacggaattatctttgctattgttacgattatctcagtaggtctattgcttcctggtgtgcaatctaacgctatagcaagttctatgcataatgcgattcatgttccacaatggttaatgggtggtattgttgtagttattttgggattaattatttttggtggtgtacgtattattgccaatgttgcaacagccgttgtaccatttatggcaattatttacatactgatggctgtcattatcatttgtatcaatatacaagaagtgccagcgttatttgcattaattttcaaatcagcatttggattacaatctgcttttggtggtatcgttggcgcaatgatagagattggtgttaaacgtggattatattcaaatgaggctggtcaaggtacaggtccacacgcagcagcggcagcagaagtatcacatccaagtaaacaaggtctagtacaagcattttcagtttatattgatacattatttgtatgtactgcaactgctctgattatacttatttctggtacatataatgtgactgatggtacggttaatgcgaatggcacaccgcatttaattaaagatggcggtatttatgttgaaaatgcaacaggtaaagattattcaggtactgcgatgtatgcacaagccggcattgataaagcgttccatggcagtggttatcaatttgatcctactttctctggcgtaggttcgtactttattgcatttgctttattcttctttgcatttactacaattttgtcgtactactacattacagaaacaaatgttgcttatttaacgcgtaatcaaaataatcaagtttcatcgatatttattaatattgctcgtgtgattattttgttcgctacattttacggtgcagttaaaacagctgatgtagcatgggcattcggtgatttaggtgtaggtctaatggcttggttaaatatcattgcgatttggattttacataagcctgccgtaaatgctttaaaagattatgaaattcaaaagaaacgtttaggcaacggttataatgcagtttatcaacctgatccgaataaattacctaatgctgtcttttggttgaagacgtatccagaacgtttaaaacaagcacgtgccaaaaagtaatctacttttgtttatagtatatgtagtgatcatttgataaaaaagaaaagtattgagaattttaggtgctcagaaatttgaattttaaaaatatagtgtctcttggtacaataacaatacaactactaggggcacttttttatgtcagaatttaaaactggtaagattaataaacatgttttatatagtaatattttaaatagagatgtcacgttaagtatttatttaccagaatcttataatcaacttgttaaatataatgtcattctttgctttgacggattagattttttacgtttcgggagaatacaacgtacatatgaatcgttaatcaaagaagcgcgtattgatgatgcgatcattgttggattccattatgaagacgttgataagcgtagagaggaatttcatccacaaggaagtcgttctcatttaactattcaatcagtcggtaaagaaatattgccatttattgactcgacgttttctacactgaaagtaggtaatgcaaggttattagtaggggatagtttagcgggtagtattgccttattaacggcgttgacctatccaacgatttttagtcgtgtagcaatgttaagtccacattcagatgaaaaagtattagataagctaaatcaatgtgcaaataaagaacaattgacaatttggcatgtcattggtctagatgaaaaagattttactttaccaacaaatggtaagcgtgccgatttcttaacaccgaatagagaattagctgaacaaattaagaaatataatataacttattattacgatgaatttgatggtggtcaccaatggaaagattggaaaccattgctgtcagatatattattgtattttttaagtaaaaacacagatgatcaactttatgaataatttacattagtagatttagtatgaattgtcttcatatagtctggtctataatataatttataaaagattttactgtttaatttaatttaaatttgacgaaattgcaaaagatgtataatgaattatttttaatgtaacggttttcaaagaaatttgatataatagcaataggttaaacaaaggaggaattcagatgattttaggattagcattaattccatcaaagtcatttcaagaagcggtggattcttaccgtaaaagatatgataaacagtattcacgaattaaaccacatgtgacaattaaagcgccatttgaaattaaagatggtgatttagattctgtcattgaacaggttagagctcgtattaatggtataccagcagtagaagttcatgctacaaaagcttctagcttcaaaccaacgaacaatgtgatttactttaaagttgcgaagacggacgacttagaagaattgtttaatcgctttaatggagaagatttctatggagaagctgaacatgtttttgtgccacactttacaatagcacaaggactatctagccaagaattcgaagatatttttggtcaagtagcattagctggggtagaccataaagaaattatcgatgaattaactttgttacgttttgacgatgacgaagataaatggaaagttattgaaacgtttaaattagcttaagtaacataatagtattgttaatcgtagtatgtttgaattaataagaaaatggtcatttttattgaatgtaataaaaatgaccattttctttattttaaaatacgttttaaccttacttagctttttctctatttactataaagtagcttccataaaatacagctaagactaaaaagattaatgccgagaaataaaatgtattgtttaaattgttggtaaattgtgtaattaatccgccaaataatggccctatcattgagccgaatccttggatactattaaaaacaccccaagtttcttcttgttcatctgatttgataaatcgtgccataaaggtattccatgctggtaataagatgccatacattagaccgatagctaaagcgataatccacaagatgtgaatattaacaatcatagatagagtaaaaattaatatcatgtataaaataaatccgcttagaataacaccatacataaagtttctgctgcggttatctattagtttcgataaaaatagcatcgaaactgcacagccgataccaccaataatgattgcaacagtatattcaattgtgcttacgttaataaccttagtagcatatgttggtaatataggaactagggcagcaattgcggcaccttgtaaaagaataccagggaacaacaataaatggcgctttgtcacatcaacaatttgtctcaattgagctttaactggacgagtattataatttgttaactttacatcgacaaaataatataatatccatgcaattaaaacgactaaagacatcatgaaggcaaagcgtgttgggtgcactttgataagtagattcataaaaaccatacctaccaataggcctaacaaccatgaaaaataaacatagcccatttgtttgccacgtttatcttcttcaacactggataacataatgacccaaataggactaactgcaataccgagcatcatagcactaaatatgattacaaaaggtgatgctggaaaccaaataactaaaaataaacttgtaaatgctaaaataaatccagtcgttaaaacgatttttgtgccgaattttttcagtaaaaatcctataacaaagtttgtagatgcatcagcaataaaatgtattgaaaatgctagagacgttattgctacagcaatggatgtaactgttggcaagaaattaatatagcttaggatatacatgcctctcgcaaattccattaaaaataagataataagcattaaaatgaaatttttatgattagcgtaattatttaacgaagaatcttgcatataaaggaacctttccataaatctcttgtggttgtgatgaatgaccgattaaatcaagtaagtctcgacatattgtctgtgtagcatacttaattttatcttgttccattgtactaatcatgttagttaattgctcattaccgttagttaaacttgctacaatttttattgcttcttctggagtatcagcgattttaccaaaacctttttcttcaaagtaaagggcattttcaagctcttgaccaggtgcaggatttaggaaaatcattggaatacaacgggcgaaaccttcagttattgtgataccaccaggtttcgtaatcataagttgacttgatgccatccattcattcatgtgtttggtataacctagaatcaatacattctcgttagatttaaacttagctgttaaagaacgctttagctctttgctcttaccacaaatcataactacttgtgcatttgcacttttcgctaatatatcagtaatcatcgtgtcaaaacctttagatacaccaaatgcaccagctgacattaaaatagtttgcttatctggatctaagttgttgtctattaaccactgcttttgattaataggcgtttcaaatttgttatcaataggaatacctgtcactttaactgttgaaggatcaatacctacgtctatgaagtcttgtttcgtttcttttgttgccacataatatcttgttgaatacggcgtaatccagtttttatgtaagcgatagtctgtcatcactgtagcaactggaatattaatgttaaattgctcagttagtaccgacataactggtgtaggaaacgttaataatattaaatctggcttttcttttatcaataaattaattaacttattaagtccatagtatttgtaaaaacatttgtctagtttatctgggcggctgtaataaaaccctttgtacatatttctaaaatatttaaagctattgatataccattttttacaaatagaagtcaaaattggatgagcttccataaataaatcgtgctcaatgacgcttaaatggtctagattcatatcattaagttgattaacgatactctgtgtaacttgcatatgaccgttaccgaatgagccagtaataatcaatatctttttattttgagtaaccattaatagccaccctccgttagtttgaaaattttatttaagtgtaacttattttacggcattataaaagaaataaagacgcaaagtcgttacatttatagcaattttaatctatagatgaattgatacaaaataaaacgttattttataaagcaatttattgttctatgttttatttgtatatttaaaattatccagtatacaattatagcatatttttggaaacaattatgatattataccatgttacaagatggttttaataatttaagatgagccataattgtaaaactaattcataataccgtatgttttatttttaatagtagaaattagaaaatgctgattagtaggatataacagtgaaattataaatttattaacatcaacaaaacgtgtataataaacatattgtagaaaaaggagcggttcagtttggatgcaagtacgttgtttaagaaagtaaaagtaaagcgtgtattgggttctttagaacaacaaatagatgatatcactactgattcacgtacagcgagagaaggtagcatttttgtcgcttcagttggatatactgtagacagtcataagttctgtcaaaatgtagctgatcaagggtgtaagttggtagtggtcaataaagaacaatcattaccagctaacgtaacacaagtggttgtgccggacacattaagagtagctagtattctagcacacacattatatgattatccgagtcatcagttagtgacatttggtgtaacgggtacaaatggtaaaacttctattgcgacgatgattcatttaattcaaagaaagttacaaaaaaatagtgcatatttaggaactaatggtttccaaattaatgaaacaaagacaaaaggtgcaaatacgacaccagaaacagtttctttaactaagaaaattaaagaagcagttgatgcaggcgctgaatctatgacattagaagtatcaagccatggcttagtattaggacgactgcgaggcgttgaatttgacgttgcaatattttcaaatttaacacaagaccatttagattttcatggcacaatggaagcatacggacacgcgaagtctttattgtttagtcaattaggtgaagatttgtcgaaagaaaagtatgtcgtgttaaacaatgacgattcattttctgagtatttaagaacagtgacgccttatgaagtatttagttatggaattgatgaggaagcccaatttatggctaaaaatattcaagaatctttacaaggtgtcagctttgattttgtaacgccttttggaacttacccagtaaaatcgccttatgttggtaagtttaatatttctaatattatggcggcaatgattgcggtgtggagtaaaggtacatctttagaaacgattattaaagctgttgaaaatttagaacctgttgaagggcgattagaagttttagatccttcgttacctattgatttaattatcgattatgcacatacagctgatggtatgaacaaattaatcgatgcagtacagccttttgtaaagcaaaagttgatatttttagttggtatggcaggcgaacgtgatttaactaaaacgcctgaaatggggcgagttgcctgtcgtgcagattatgtcattttcacaccggataatccggcaaatgatgacccgaaaatgttaacggcagaattagccaaaggtgcaacacatcaaaactatattgaatttgatgatcgtgcagaagggataaaacatgcaattgacatagctgagcctggggatactgtcgttttagcatcaaaaggaagagaaccatatcaaatcatgccagggcatattaaggtgccacatcgagatgatttaattggccttgaagcagcttacaaaaagttcggtggtggccctgttgattaataaaagatttattgatgaaggtaaaactattgatgtttatttattcgaagcattaaataaccagataatcattgctataccagattggttttggtcatatcagatggcaatgacattagatgaagaaacttgttttgaagcaatactcatgcaattgtttgtttttaaagaagaggaagaggcagaatcgattgcatcacaactaacagattggatagaaacatataaaaaggagaaagactaatgaacttaaagcaagaagttgagtctagaaagacttttgcgattatttcacatcccgatgcagggaaaacaacgttaactgaaaaactattgtacttcagtggtgctattcgtgaagcgggtacagttaaagggaagaagactggtaaatttgcgacaagtgactggatgaaagttgaacaagagcgtggtatttctgtaactagttcagtaatgcaatttgattacgatgattataaaatcaatatcttagatacaccaggacatgaagacttttcagaagatacgtatagaacattaatggcagttgacagtgctgtcatggtcatagactgtgcaaaaggtattgaaccacaaacattgaagttatttaaagtttgtaaaatgcgtggtattccaatctttacattcattaataaattagaccgagtaggtaaagaaccatttgaattattagatgaaatcgaagagacattaaatattgaaacataccctatgaattggccaattggtatgggacaaagtttctttggcatcattgatagaaagtctaaaacaattgaaccatttagagatgaagaaaatatattacatttgaatgatgattttgagttggaagaagatcatgcaattacaaatgatagtgattttgaacaagcgattgaagaattaatgttggttgaagaagcgggtgaagcctttgataatgacgcgctgttgagtggagacttaacacctgtatttttcggttcagctttagctaactttggtgtacaaaatttcttaaatgcatatgttgattttgcgccaatgccaaatgcgagacaaacaaaagaagacgttgaagtaagcccgtttgatgattcattttcaggatttatctttaaaattcaagccaacatggaccctaaacaccgtgatagaattgcctttatgcgtgtcgttagtggtgcatttgaacgtggtatggatgttactttgcaacgtactaataaaaagcaaaagatcacacgttcaacgtcatttatggcagacgataaagaaactgtgaatcatgctgtagcaggcgatatcattggactatatgatactggtaattatcaaattggagatactttagttggtggaaaacaaacctacagtttccaagatttaccacaatttacgccagaaatttttatgaaagtttctgctaaaaacgtcatgaaacagaagcatttccataaaggtattgaacaattagtacaagaaggtgcgattcaatactataaaacattacacacaaaccaaattattttaggtgctgttggtcagttacaatttgaagttttcgaacatagaatgaaaaacgaatataatgttgatgttgttatggagccagtaggccgtaaaattgcacgttggattgaaaatgaagaccaaattacagataagatgaacacatcaagatcgattttagtgaaagatagatatgacgatttagtattcttatttgaaaatgaatttgcaacaagatggtttgaagagaaattccctgaaattaaattgtatagtttactttaacagctcaattgtataatcgaatttgttacattaaaaataattgtttcgttgaagaaaaataaattgtatattttaaaagaaaaaggtatactatgatgtatcaaatgaataacctatggcattttgtcagaggggagtaacttaagaatcatgaccgtataaatgattcgacactttatcgtcattacgaagatatcttccggtaaagtgggcaatttaaattgcttagtgagacctttgctatttatttagcataggtctttttgtttgtacttaacttatttatttaaaggagttgtacatgttaatggatccaagtttgatcttaccttatttatgggtacttgtcgttttagtatttttagaaggcttattagcagcagataacgcgattgttatggctgtaatggttaagcacttaccacccgaacaacgtaaaaaagctttgttttacggtttgttaggtgcatttgtatttagatttttagcattattcttaattagtattatcgcgaacttttggtttattcaagctgcaggagcggtttacttaatttatatgtcaatcaaaaatctgtggcagttctttaaacacccagaaattgaaagtcctgaagctggagatgatcatcattatgatgaatctggtgaagagattaaagcaagtaacaaatcattctggggaactgtgttgaaaatagaatttgcagatatcgcatttgccattgattctatgcttgctgctttagctattgctgtaacacttcctaaagttggtattcactttggtggtatggacttaggtcagttcgtagtcatgttcctaggtggaatgattggtgttattctaatgcgttatgcagcaacatggtttgtagagctattaaacaaatatccaggacttgaaggtgcagccttcgcgatcgttggttgggtaggtgttaaattagttgtcatggtattagcgcacccagacatcgctgtattgcctgagcacttcccacatggcgtattatggcaatctattttctggacagtactaattggattagtaattatcggttggttaggttcagttgttaaaaataaaaaatcgcataaataattgatgtgaagcggacaatcttaatttagtttaaggttgtcctttttcatttaattgagtgatttatgaaaaatggattttgaagaatgtgaatcaaaagatgcgatatagtattaagaaaatgtgccttttatatttagcattttttcaatagaaattatatagattttaaagcaaattaggtgttaatgtgtcataatgataagtgattttattgaatggagtggacattagtggatattggtaaaaaacatgtaattcctaaaagtcagtaccgacgtaagcgtcgtgaattcttccacaacgaagacagagaagaaaatttaaatcaacatcaagataaacaaaatatagataatacaacatcaaaaaaagcagataagcaaatacataaagattcaattgataagcacgaacgttttaaaaatagtttatcatcgcatttagaacagagaaaccgtgatgttaatgagaataaagctgaagaaagtaaaagtaatcaggatagtaagtcagcatataacagagatcattatttaacagacgatgtatctaaaaaacaaaattcattagattcagtggaccaagatacagagaaatcaaaatattatgagcaaaattctgaagcgactttatcaactaaatcaaccgataaagtagaatcaactgaaatgagaaagctaagttcagataaaaacaaagttggtcatgaagagcaacatgtactttctaaaccttcagaacatgataaagagactagaattgattctgagtcttcaagaactgattcagacagctcgatgcagacagagaaaataaaaaaagacagttcagatggaaataaaagtagtaatctgaaatctgaagtaatatcagacaaatcaaatacagtaccaaaattgtcggaatctgatgatgaagtaaataatcagaagccattaactttaccggaagaacagaaattgaaaagacagcaaagtcaaaatgagcaaacaaaaacctatacatatggtgatagcgaacaaaatgacaagtctaatcatgaaaatgatttaagtcatcatataccatcgataagtgatgataaagataacgtcatgagagaaaatcatattgttgacgataatcctgataatgatatcaatacaccatcattatcaaaaacagatgacgatcgaaaacttgatgaaaaaattcatgttgaagataaacataaacaaaatgcagactcgtctgaaacggtgggatatcaaagtcagtcaactgcatctcatcgtagcactgaaaaaagaaatatttctattaatgaccatgataaattaaacggtcaaaaaacaaatacaaagacatcggcaaataataatcaaaaaaaggctacatcaaaattgaacaaagggcgcgctacgaataataattatagtgacattttgaaaaagttttggatgatgtattggcctaaattagttattctaatgggtattattattctaattgttattttgaatgccatttttaataatgtgaacaaaaatgatcgcatgaatgataataatgatgcagatgctcaaaaatatacgacaacgatgaaaaatgccaataacacagttaaatcggtcgttacagttgaaaatgaaacatcaaaagattcatcattacctaaagataaagcatctcaagacgaagtgggatcaggtgttgtatataaaaaatctggagatacgttatatattgttacgaatgcacacgttgtcggtgataaagaaaatcaaaaaataactttctcgaataataaaagtgttgttgggaaagtgcttggtaaagataaatggtcagatttagctgttgttaaagcaacttcttcagacagttcagtgaaagagatagctattggagattcaaataatttagtgttaggagagccaatattagtcgtaggtaatccacttggtgtagactttaaaggcactgtgacagaaggtattatttcaggtctgaacagaaatgttcctattgatttcgataaagataataaatatgatatgttgatgaaagctttccaaattgatgcatcagtaaatccaggtaactcgggtggtgctgtcgtcaatagagaaggaaaattaataggtgtagttgcagctaaaattagtatgccaaacgttgaaaatatgtcatttgcaatacctgttaatgaagtacaaaagattgtaaaagatttagaaacaaaaggtaaaattgactatcccgatgtaggtgttaaaatgaagaatattgtcagtctaaatagttttgaaagacaagcagttaaattgccaggaaaagttaagaacggtgttgttgtagatcaagttgacaacaatggtttagcagatcaatctggtctgaaaaaaggtgatgtaattactgaattagatggcaaacttttagaagatgatttacgctttaggcagattatatttagtcataaagatgacttgaaatcaattacagcgaagatttatagagatggtaaagagaaagaaattaatattaaactaaaataatgttgaggtgaacaacgtgtcaatttttagccagtttttaaaaagatcaagccctcaacaaggtattgtattgtactatatcgtcgcaattgtcattgcatttttattattaaacttaccgtatgttcataaaccaggtgtagaagtaaatccaattgacacattatttgttgccgtatccggaattagtgttactggattgtctccgataagtattgtcgatacctattctacatttggacaattaattatcctcgtgatattaaatattggtggaattggcgtcatggcaattggtacgatgttatgggtggtactaggtaaacatattggaattagagaacgtcagttaattatgttagataataacaaaaacacaatgagtggtaccgtcaaattgattattgatattgtaaaatcaatatttgtaatcgaactcgtaggagccatgttattagcattttacttttatcgagataatccagatttaaaatatgcaatcatgcaaggtgtttttgtttctatttctgccactaccaatggtggattagatattacaggtaagtcattaattccttatgcacatgattattttgtacaagcgatagttatatttttaataattttaggatcaatcggcttcccagtattattagaagttaaagcttatattcaaaatagggttactaattttagattttcattatttactaaaattacgacatcaacatatttattcctatttattgttggggtattagccattctattatttgaacataaccatgcgttcaaaggtttaagttggcatcaatcgttattctattcgctgtttcaatcagcgactacaagaagtgcgggtcttcaaacaattgatgtgacaacactaagtgaccccactaatattatcatgggtattttaatgtttataggatcttcgccaagttcggttggtggcggtattcgtacaacaactttcgctattttaattttgtttttaattaactttagtaataatgccgataaaacatccattaaagtttacaatagagaagtacacattatggatattcaacgttcatttgcagtatttacaatggcgacaattttaacatttttaggaatgctaattatatcagctactgaaaatggtaagcttacatttttacaagtattttttgaagtcatgtctgcatttggaacttgtggactatcgcttggtgtcacaagtgatattagtgatatttctaaggtcgtactaatgatactcatgtttataggacgtgttggcttaatatcatttatcattatgatagcaggacgtcgagaaccagataaattccattatccaaaagaacgtattcaaataggataatataatagcaatctaagtttagttaatgtagattttaactggaacttagattgcttttttagtttgtatttttaacttattttataagacgattggtttcgaaaatggtaaactagtaacaatgagaggtgtaacatgatggaaaaaaatgaaaacattaatgtagagattttaactacgtcagatatgcatagtcatttcttaaatggtgattatggttcaaatatttatagagctggtacttatgttaaccaagtaagagcacaaaatcatcgcgtcattttattagatagtggcggaagtttagctggctcgttagcggcctattattatgctattgttgcaccttataaacgacatccaatgataaagttaatgaacagaatgcattatgatgctagcggtgtgagtccaagtgaattcaagtttggtttatcatttttaactcgttcaattgctttggcacgttttccatggttatcagcaaatattgaatacaatgttactaaggagccttatttttcaactccatattgtattaaacattttggtgacttaaaaattgctatcgtaggcgtcacagcagatggtttaatggaaaatgagtattctgaaatggagcaagatgtatctattgaaaagacattagtggcatcaaaacgttggattagatatatccatgaagttgaagagccagattttttgattgtaatttatcatggtggattgaataaaattagtaatagtacgaaaaataaaaaggcaagttcgaatgaagctgaaaaattaatggaagaactcggtgttatagatttaatgattacagctcatcagcatcaaacaatagtaggtcaagatcatgaaacgtattatgttcaggctggtcaagatgccaaagagcttgtacatctttcgattaattttaaaaagagaacaacaacttatgatgttgaaagcattgattctaaagtgattgacttaaatgagtatgaagaggatcaagaattattagatttaacattctatgatagaaaagcagtggcttattggtcacaggaaatcataagtgataaaggtttgatgttatcagtaaatgggttacaagatttagtctgtcaaacacatccattttcgcaattattacatgatgcaattcaccttgcatttgataatgatataacatgtgttcacgtgcctatgaacggagagaaggggttgagtggacagattcgaaatgaagatttgtatcatgcatacccatatccagataagccaatggatatgacaattagtggtcaaaatatcaaagatatattggagtatagttattcacatttagattttgttaacgagcaattaagcttaacaattattgatgaaacgttatgtacaatgtggcaaggattcaattatgagattgatatgaatcaagaacctgggcaacgagtaatgttagatcaaattgatttgactaagagttatagagttacaatgactgactattgttatcgtaactacaagaattatttaaaaaatgctattatacatgaatcatacgatgaaacaatgagtacattaattgcagagaagttaagagatccgaattatcgtatttcatgtagtgataattttatagttaaaaacaggtaaatattgctatgtaataaattaattataagttcaacaagtataaaaacctttcttagagaagattatctaggaaaggtttttagaattttaaaattgatataaaagaacagtgaaattctcattcattatatataagtaaacaaaaaagctaaaatggtatataccattttagcaagtaacggaaacggagggattcgaaccctcgcgccgctttcgcgacctacacccttagcaggggcgcctcttcagccaacttgagtacgtttccaatggctccacaggtaggactcgaacctacgaccgatcggttaacagccgatagctctaccactgagctactgtggattaatttgtatgtgtttgaatatcaagcacaaatattattataacaagattaagttaatttgcaatagataccttaaaaaaatatgcagaacatttacactatatttataaaacattccgcatattttaaaaataaacaatttatttatcttcaaataaagaatagcgtgtcaatgcttcaaacacattcaatgtggctttattataatctattggttggtcgggattttttgatatcatgcgagattgtttatctaccatgtaatagtaaaaaatggaattgttatattgatgccataaactgtggtatgaaacatgaagaatgattgattcattattaataaatgtcactttacatttacgattttttaattctttaatactttcgatataatgcatatttaaccaaatattttcattttgtctgtcagaatgtgttgggaaaaaataagttggaaataatggtgttagtaaaataggtggtttactagaaatgccagtaatgcggtttgtctttgctttcttgccaagataagtattaccataaaatttgcaagagcgttcaatgattttctggactttaaaaggattttgaatacgcgttttgtcaaaccgaattatttcactaccgtttctttgatcgtcatcatcaaatgctggtcgaataaccatgtctcctttgcgtatcacataaatattttgagaatacataagcaaaacctcgctttattaagttttaaaccattaatataaaaatacaattaatgatataaatatattttataataaaattctgagttgtcaagttattattttggtgaaaatgtacaataatttttaactaatagtcagaatattcattgatttcaaaattagaaaaatgtatacttattataaattaaagaaaggtagtggtttctatgaaatacaatactaatgttaaacatacaactttagaagcgtttgtcacaactgtcaatgatttgggtattgaattaattatcaatgaagcacttcgagaggtaagaaaacgacagctcatagaacttatagatgacgcactcgtcaataaagatgaagcagcatttaatcaatatacggcagaatacaaaaatttggaggcatttctcggtgaataacattgattcgaattccataacgcaatcataaaaggactattcttaacatctcatacatgtaagaatagtcctttaatcgtttatgacattaatctaattaattcatgtctatctatgtcaccgaaataatgatataaatcatattctgatagtgcttcttctatgtgctcaaagtcgtgtagacagccaactaatgcattttcaagatcagtgacatctccgacaccaaagaaatcaccgaatatttttgcatgttcgattttacctcgtttaacatcaaacttaatttgtacaaatcctttttcaaatttttcctcgcgttcaaagttatatttagggtttctaccataattccattcccaagttctatatttgtcgttacttaacttttcaatattttcccaatcttcatccgttaatttatattcttctacttcagtttctccaaagatagttttcaagatgatttttttaaattcttcaatttctaaagggtcatttaaaaattcttgaatgtttgctacccgtttacgaacagatttaataccttttgatttaatcttagctggattaacttttagtgcattctgaacttcgtctaaatcactatttaacatcaacgtaccatgactaaacattctatttttaactttaaccatagcattccctgagattttcgcttgtccaacttgaatatcgttacgaccagttaattcagcatttacgcctaaagattgtaatgcttgaacaattggttcagtgaatttttggaaattgtggaaactgttaccatcatcatctgttataaaactaaagtttaaattgccagtatcatgataaacagcgccaccaccagaaattcttcttactacatcgatgttgtgagcatcgatatatgtctgatttacttcctctatcgtattttgattctttccaacaatgatagatggtctatttatgtaaaataaaaagtaactttcttctgctggtaaattttttaaaacatattcttccattgctaagtttaaagttggatctgtaatattattattactaatgaatttcattacaatctctcccttatatctatatatattctctacttatttatgccttaactttgctcaaaatgccaattatatactcacaaatcattctaaatatcggcttaaagttacattttattatttttgattgttaatagtttatttgttaagtgaattttagtacaatataatttagttatgatttaaggaggacttaaaatgactgttgcagaagtgggtaacattgttgagtttatggatggattaagaggtcgtgttgaaaaaatcaacgataactctgttattgttgacttaacaattatggaaaattttaatgaccttgatttaccggaaaaaactgttatcaatcataaacgatataagattgttgaataagaaggtaagttataatgaataaaatctcgaaggctttaacttggtttattataagtttcattatatttcatctcatattatttattatgtggggcgaacaccaagaatactggtatttatatacaggtataatgctaattgctggtatcagttatgtattttatcaaagagatattgaatctaagcggttgcttacatcaattggtgttggtattattacggcaattattttaattatgcttcaacttttattctcacttataacttctaatttaagttatagttcattaattaaagaattagcaagaacaggtgtcaattggaagtggcaaatgttagtaactttactttttgtcattccatgtcacgagttatatatgagaactgttttacaaaaagaattaacacatttttcaataccgaaatgggtagctatattaataactgcaatttgttctagttcattatttatttatttagataattggtggatagtaacatttatatttgttgcacaagtgatattatcattaagttatgagtatactcgacgtatagcaacaacatccgttgcacaaattgtagctattatattgttattaatttttaatgcttaaataagcttttcttagacgtatgtgttctaagaaaagcttttttgcttaagaatagcaatacgaagattcgaggcatgcttcattatagtggtaatattttttaacagcaagcggttattattgagattaggttttagtcagtttttattactaaatattttataaaaatggtataatatttttgagcaagttgaattgatggtggctatctgagtaaaggggggtggtgcctatggcattacttaacacttttgaaaggaaaagcctattgtgatatctattgcaaacgcattacatttaatgttaagtttcggtatgtttatcgtcactttcattggtatagtagtagcaataataaatttaagcaataaaaaataaccatcatttcaaaactttgacatagaatgatggttaaagaaaatctcatttagtcaccgtctttttaacgggctcattaggcgacatgttcctgcatgtcgtctttttacatttttatagtaacatatcttttatttaattgtctatttttattagatgtgtaacaaaattttgaagtattttccgtatattgcctgctaaacatgtcagatttgaaaggaaaatcatactgtggtagaaatcaattatgattatatggtagtacttataaataagtgatttctattgaatatgtaatgaagttcatatattaatataactttcattgatatagaagtcgcaatgattaatttaaacaataaaaaacaaccatcatttccaaactttgacaacgaatgatggttaaagaaaatctcatttagtcaccgtctttttaacgggctcaataggcgacatgttcctgcatatcgtctatttatacactgcacaatttaataataatacaattatactttgatgtccatttaacataaagtggttgaaatttgcagcaaataaattaaccttgactattttcagaaaattctgtataaataacgaaaaagagatatggattaaatatgaagaggtgtttttatagaagaataaaatttttggcactatattatatttaactttagcacttggattatcaacagcagcttatgcatctacagaatacgcagaaggaggcacttggagtcatggtgtcggcagtaagtatgtttggtcgtattattatcatggtcataaaggacatggtgcaacagctattggaaaatatagatcatttagtggttatacaagagctggtgtaaaagcaaaagcatcagctactaaacataattggtgggtcaatagagcgtattataacatttattaaatactaaaaaatcatagaaaataaacaacgcaagaggtacaacatgaaatggttcaaattaatacttgatgttacaatcttcattctgattgctatattgttatttgtttatacatataaagaaaacgaagaaatattgcctgatactaaataccctatagcggtaactgactggaataaaaaatatagtaaaaatgagatttataaacgtatagatcaattcgctaaaaatgagaacgtagcaatctataaatcaacttcaaattatacaaacaaaaacgtagataaagatatatatgtatttaataaatcaaaagcagcaactatcactccttttaatgctaaatataacattcattatttaagtgacgacgaagtattaaaaaaagatatcaaagggagttattttgtaaaagacaaaaattttgacgtgtctaaattcataaattttttaaaagaatatggtgttactgctgaatcatacaaaatagatcatatgatgattgccgttggtgtcattaaacaaatgaatatagtagttccattatcctcacttttaatcgtttattttatttattatattttcgaaaagaacattaatttcaaagcgtatgcgattaagtatttaaatggttttacattaagaaaaataattttcgaaaatttttcaaagaaatgcacgtattgggtaacgttaatcataactcaaattcttttaactacaagtgtactttggatattaaattacacgggtaatttagatttattcatattaagaatagttctgctttcatgtcttttcattttaacgattagtgttattaatttatggactttcttaatgttactaaatttaaatattgcaaatatgattaaaggtaagcagcactttaaaacaattcgttttattaatacagtttgtaaaagtattctcttagtactaatagctaatgtaatgatagaaaatactagtgttattaaagatttgaataaaataaaagaaactgagaaatattggaatgtattagatgattattacacgattgaatttgcaccttatcacgaaacaaaacaaagtttgattgataatatggtgcgatcagaacaattagtaaaggctagtgaagcagaaaataatgcgattttattcaaaccaaagggtgactccgttgacaatgacaacttttcgcctgatgaggggaatgtaatattagtaaataatcagttctggtcgatttattacaagcagtttcaacctgatattccgataaaaaatcaaaaaaataatgtcgaagtaattattccacaaaagtttcatgcaatgcgtaatgaaatcaatcaagcatatcattcatggtttgaatttgtacaaaataaaaataataaagagaataagttatctatacagtttatcaacaaaaatgattgtcgaattttttcatttgatgcacgagatagtcgccatttgtcatttatagaggcgccaatcattgtgaatgttcaggcatcagatttatcgaatgatttttattatgccatgatcagtcaaggcgggtatttattcaaaaattatgacgcgctagtaaaaaatattgaaaagtatcatcttgatggggaaatcagtggaataaccaattataaagatagcgtgatggaaatgtatcatgaaaacaatttgaaattaacagtactcaacttttcacaaatcattatcgcaatcattttaataattattattttatttgatgtgaaatattattttgaacagcatcgaaaattactcgtaatcaaaaagctatatggttattcaacattaagagccaattaccaatacttattaataaataatatagttgttatttttattggaatattgacgaatgtaattttacattctcactatataatgatgttatttgcaacgattcttgtcgttcaaatattattgcagatttgcagcctatactatcatggccgacgttttaatgaagttatcaaggagttttaactatgaaatttatcattgcaatattattaggattaatattatccattactattgcttttacaatcatacatcatcctatacttgatcgttttaatcctttcttaaaaacggagtatagttatgccaaagtgccaaaaggtacgcaacaatatgttaatattacggcttatagtgaaagaggggaaaagcttgattataaattaacatttaatggattttcacctagtagaacgtatgtcgaaataaagcataaagggcaatatgtcatatcgatcacatatgttgaaaaagaggatacaccaaaagaggtaagacaagaatgatagaattaaaagatttaaccatacaaaaaggtaatacacatattttgaagaaacttaatttgaaatttcaatgtggaaaatcatatgcacttattggtaaaagtggatgcggtaaatctacattattaaatactattgctggacttgaaaaaacaggaaaacaatatgtctattttaatggtcaattagaacaatttaaatctaatttttacagagataaattaggatatttatttcaaaattatggattaatcgataatttgacagtaaatgaaaatttagatattggattagcatataaaaaaataagtaagaaagaaaaagaacaaataaagatacgttatatagaacagtttggtctgtcaaacagtttaaaaagaaaagttcatacgctaagtggaggtgaacaacaacgtgtcgctttaattagaatgatgttaaaagatccgattgttatgttagctgatgaaccaacgggtgcgttagatcctaaaacaggacagatgattattcaatcattatttggtttggtcgatgaaaataaagtgctgattttagcaacacatgatatggctattgcaaatcaatgtgacgaaataatagatttagaacagtatagaaaagtagcatctatgtgatatccaaaagataaaattaaaagccaatcaatgggaaatgttgacttcaacactccgtttgattggcttttatactgtgttactaagttatgaaagtaacaacggcaaactgaaaaaaagcaatataataatatttaatacgattagtaataaatgtaattgatttttcgttttaatatagcaaaaaacaatgactaaagataacaacaatatcatgattgcacctgggaagaaccataatgctgaagctgtgtaccaaatcattggtaacgccataataataaaagatataagacaagaaaggataccaataatattataagttctagtcaaaattacacctccaattttcactttaaaatgacatgcgtaaaacaatcattttaaatacattatacaataaaattaaattgtgcggtagaagaatttgaaattaaattgaattgtttttggtagttggtatatttataacactctgcaaaagaatgtagcaaaattagataaattagattatttaaaattatgcgtgatattattatttttatcatgcaaataattataataacaatatttaattattgtatttacagttgattaatagcgttgtgaagtataaaattattttgtaaaacaattttgttattaagaggtgcgctatggaaaaggggattttcaattacgataatgcgaatgtattaaaattagatactaatcagttaaatgaaaacataaaagtcattgacgatatatttaaaaattatgagcagatagagccaactatagaagtcgaaaatggaaatacaaaattaaaattaaatggatattttattgcgtcaattataagcccattaaatttaaataaacttaataatttatatgttgaagaagaattttatcatacatataacgaattaattgttaaatatactgaggtaaaggaataattataatgaaaaaaatatttatgatggtacatgagttagatgtgaataaaggtggtatgacctcttcgatgttcaatagaagtaaagagttttatgatgcggacatacctgctgatattgttactttcgattacaaaggaaactatgatgaaattattaaagctttgaaaaaacaaggtaaaatggatcgaagaacgaaaatgtataatgtatttgagtattttaaacaaatttcaaataataaacattttaagtctaataaattgttatataaacatatttcagaaagactaaaaaatacgattgaaattgaagagagtaaaggtatttcaagatattttgatataacgactggtacatatattgcctacattagaaaaagtaaatctgaaaaagtgattgatttctttaaagataataaacgaattgaacggtttagttttatagataataaagtgcatatgaaggaaacatttaatgtagataataaagtttgttatcaagtattttatgatgaaaagggatacccatatatttcaaggaatattaatgctaataatggtgctgtaggtaaaacttatgtgttagttaataaaaaagaatttaaaaacaatttagcactgtgtgtttactatttagaaaaactaataaaagattctaaagatagtattatgatttgtgatggaccagggagttttccaaaaatgtttaatacaaatcataaaaatgctcagaaatatggcgttattcatgttaatcatcatgaaaatttcgatgatacgggtgcatttaaaaaaagtgagaaatatattattgagaatgcgaataaaattaacggtgtaattgtattaacagaggcacaaagattagatattcttaatcaatttgatgtagaaaatattttcactattagcaattttgttaagatacataatgctccaaaacattttcaaactgaaaaaatcgtaggtcatatttctagaatggtaccaacgaagcgaattgatttgcttattgaagtggctgagttagtcgtaaaaaaagataatgctgttaaatttcatatatatggagaaggatctgtcaaagataaaatagctaaaatgattgaagataaaaatttagaaagaaatgtttttcttaaaggatatacaacaactccacaaaaatgcttggaagattttaaattagtcgtttctacatctcaatatgaaggtcaagggttaagtatgatagaagcaatgatttctaaaaggcctgttgttgcctttgacatcaaatacggaccaagtgattttatagaagataataaaaatggttatttaatagaaaaccataatattaacgacatggctgataaaatacttcagcttgttaataatgatgtattagcagcggagtttggttcgaaagcgagagaaaacattatagaaaaatattcaacggaatcaatattagaaaaatggttaaatcttttcaatagctaaatgaaaaaatcctaggtattcatgagtacctaggatttttacgcatgataaatacaaaaaaagagaggatagtcctctcaaacaatagttaataaaattgtagccatttcttccagctgtaactactaatacaagctaagttcattacgatatgtatgatttcaaattcataaccacttacatatcctcttgtaagtttaagtgtgaagattgagcctaacataacacaaatataaaaaacattaacataaggcgttaaaaagccgataataagtgctaaacctccaacaacttcaccaattgacatcaatactgcgatggtaggtggtaaacctaaagagcctaagaagtgaattgttccatctaaatcaacaaatttcaaagtaccatgcactaagaatgatgttgctaacatccatctaattaaaagcatacctaatttcatcatgtcacctccaacattcatatttttaaaacatagtccaaattatatttgtaaacatgtggaaagtaaagattttttataagattaattattaaatatttattaaatattctattgtattgaacaattgttgtagaaagatgtttaagtcatcagttactttttgtatttataaataaagattagtacagcatagtgcaaagattatagggaaatgaattaactattgcatcgctatttatgaatcgtaaacactattatgaaattgcgagagtagtatggacaattagaatgatggtttgagataaatgagtgttattaaccagtgcgtcattttcaaaattagatgccatttgctgtttataataagaagatttgataattaactatgataagaaaaaataataatcccctaaatacattataaacaaattaaatgataaaataataatatatatttctactaaagttgtttggaggtaaatgtgtgaataggaatatcgttaaactagttgtgttcatgctaattttagttgtagcagtagcgggttgtggtcaaaaagatactgaagagaaaactgaaatgacgacaataaaagatgaattaggaactgaaaaaattaagaaaaatcctaaacgtgttgttgtattagaatatagttttgctgattatttagcagcattagatatgaaacctgttggtattgcagatgatggcagcactaaaaatataacaaagtcagtaagagataagattggggcatatgaatcggttggatctagaccgcaaccgaatatggaagtgataagtaaattaaaaccggatttgatcattgcagatgttagcagacataagaaaatcaaatcagaattgagcaaaattgctccgacaatcatgttagttagcggtacgggagattataatgcaaatattgaagcatttaaaacagtcgctaaagcagtaggcaaagagaaagaaggcgagaagcgtctggaaaagcatgataaaatattagcggagattagaaagaaaattgaacagagtacgttaaaatctgcatttgcattcggtatctcaagagcaggtatgtttattaataatgaagatacatttatgggacaattcttaattaaaatgggtattcaacctgaagtcacaaaagacaaaactacgcatgttggtgaacgcaagggtggtccttatatatatttaaataatgaagaacttgccaatatcaatccaaaagttatgattttagccactgacggaaaaacggacaaaaatagaacgaaattcattgatcctgcagtttggaaatcattaaaagctgtgaaagataacaaagtttatgacgttgaccgaaataagtggttgaaatcaagggggattatcgcaagtgaaagtatggcagaagatttagaaaaaattgcagaaaaagcaaaataaaaatacagcgctactcgtaaatcatataagagtggcgctgtatttttaattatgtttattatctgtcggatgtgatgatttacctgaaagtttatttcgaataaatttaattacataaccgacaaggattgttttaacagttcttttaatgaattggcgcatcgttacatacctcatttctctatatcttacgaactatatacccattcatatatgctttttaaacgtcattgtcacaatttaatttttagggaatataatataaccatctttatctgcttttttagtaaaaatgacaaaaattgcatgtattattgagatgatggtagggatacctgtccagaaaaataataagtgaaaaagaccttgtccaaatttatcagcataaaatttatgaatacctaaacctccaagaaataatgcaacaataacataaatggctttattgactttcatttgtaaatcctccttaactataattctacttaaattcgttgtgaaaaccaatatttctaactttagaattttcaaactttctaaaattataagtatatctttttaaaataagctagaatttctatataataaatgttaataacgtaaaagggaatgatgacatagtgatacgtcaagcacgtccagaggaccgatttgatattgcgaagttagtttatatggtttgggatgatatggaattagaattggtaaagcatctacctaaagacatggtattagatgcaattgaaaaaagctgtgttgatgcaacatatcgaactttttatcagcatattttagtttatgaagtagaaaataaagtagcaggttgtattattagctatagtggtgaaaatgaattgaaatacgaaaaagcatgggaactacttgacttgccagaaaaaataaaacaatatggcacgccattacctgtaaaagaagctaaagacgatgagtattatatagaaacaattgcgacatttgcagcatatagaggtagaggcatcgcgacaaagttattaacgtcattacttgaatcaaatacacatgttaaatggagtttgaattgcgatattaataatgaagcagcattaaagttatataaaaaagtaggctttatatctgatggacagattgaattatacaagcacatgtatcatcatttaattgttaaataaaatactcgacagttcgatgtaagtcgattgccgagtagtatcattttctattaaatgcctgcaaataatgcactaatataaatacctaatgcatataataaaccgaaaaatgtatttgttttaccagcagcagccattgctggcatcattgtaggcggtgtatcattcttcttgaaacgtctgataactttaacaggcattgggaatgataacaacgcaagtaagtaaaataatgagccaccaggtttaataatgatcgtaagtacaataaaggcataagcgataaagtacatgattgccataaatgttaaagaagcatttttacctaatagaatgggtaaagttttgcgaccacttgctttatctttgacacggtcgcgaatattgttagccatattaattaaaccgatagtgattactataggtacacttaaccaaattacataactttgaatattgccagtttgaataaagaatgcaataacgataataaacatacccataaatacgcctgagaataattcaccgaaaggcgtccatgaaatagggaaagggccacctgtatataggtaaccaacagccatacatactaatccaactggtaataaccaaaatgaagagttagcagctaaaaacaaacctaatattgctgctaagatgtaaaatgcaatggctaatcgtagcacaagctctgggctcataccgttgcgaacaatggcaccaccaatgcctacagattcatgatcatcgaggccttttttataatcatagtattcattaaacatattagttgctgcttgaataagtaagcatgctagtaacatggcaatgaataggctgattttaatatgatcttcgctaccaagaaaatatattttagatgctgctgtaccaactaaaacgggtactacggaagcagttaatgtatgaggacgcattaaatgccaatatttcttaactgtagaatattgctgatattgattactcattgaatacaaaacctctttaaatcatattttttataacaaagatattttaatagaaagtagcataaaggtcaattgacgtgaaaaattgcaagataagtttaagcaattcttgtaacacaattatccaaaaatgatacaatataataatgagtgaaaaaagacgaagaaagaagtgaaatggatggctacgggcgtattagaggacgatattgtcaaagagatatatggcagctcaaaggaatgggtttcagttgaagtgaaattatcacagtcactagacccgagcacattatttcatctcactgacaatgaggcaggagatcgcttttatatgcgtttgaatgataatcgaacgtcatattttggctacaaagcaattcaattattcaaaaataattctaaaaataaacaatctatttttaaagactgggaaaaattaaaacataacatcacatttatacatccgcaatctgagaaacatcatcttcgagttgttggagggttccaattttcaagtcataaatcagatgatgaatggcgagagtttggactaaatcattttgtattacctgaagttttaatttcaactgataataatgggacatttttaacttatacagttaaaagggaaagttttactgttgaggcattgaacgatttaatggatttgttcaacaatatatcggacatagatgtggacgagcaaattggggaaattactagaaatgaagatatttataaagatgactggcgtcaacttgtagtagaagctatagaatctattaataatgaagaaaaaattgtactagcacgtagacggttaataaagttcgataaagatatcagtattccatatattctaaagcaagcatattctaaagaaaaaaacagttatatattcttgttagaatcacaagattctatattcttttcacaaacacctgaacaattaataaaggtcaataataaaatactatcgactaaagctgtagcaggtacaattaaacgttcacaagatgaggacgaagatacaaaaaatgttgaagcatttttaaaagataataaaaacttaatcgaacatcgatttgttgttgacagtattttacatgatattaaaccttatatcactgaattacattatgataagacgcctaaaattctaaaaaatgatcatttatatcacttgtacactgaaataaaggcgccactgaaggatgattcgtatattagtttaattgataatttacatccaacacctgctttaggtggctatccaaaagaatttgcaatggattttattgagcagaaagaatttggtacgcgaggattatatggtgcaccggttggctatatagatatatacgatgattgtgaatttattgttgcaattcgttcgatgcttattaagaaagcacaagcaactttatttgctgggtgtggcattgttaaagattctgatccagatagtgaattggcagaaacgaaccttaagttcacacctatgatgaatgcattaggagtcgatatgaatgggaaatcataaagcagctttaacgaagcaagtttttacatttgcatctgagttatatgcgtacggcgtaagggaagtagttatcagtccgggatcacgctcaacgccacttgcacttgcatttgaagcacatccaaatattaaaacatggatacaccccgatgagcgaagtgcagcgttttttgcagttgggttaattaaaggcagtgaaagacctgtcgctatattatgtacgtcaggtacagcagcagcgaattatacgcctgcaattgctgaaagccaaattagtagaattcctttaatcgttttaacaagtgaccgtccgcatgaattaagaagtgtaggcgcaccacaagcgattaatcaagtaaatatgtttaataattatgtaagttatgagttcgatatgcctattgcggatgatagtaaagagaccattgatgcaatttactatcaaatgcaaattgctagtcaatatttatatggaccacataaagggccaattcattttaacttgccatttagagatccgttaacacctgatttgaatgcaacagaattgttaacttctgagatgaagattttaccgcactatcaaaaaagtatagatgcatcggcattaagacacattttaaataagaaaaaaggtttaattattgtaggggatatgcagcaccaagaagttgatcaaatactaacgtattcaacgatatatgatttgcctattttagctgatcctttaagtcatttaagaaaatttgatcatccgaatgttatctgtacatatgatttgctgtttagaagcggcttagacttaaatgtggatttcgtaattcgtgttgggaaaccagtgatttctaaaaagttaaatcaatggttaaagaaaactgatgcatttcaaatattagtgcaaaacaatgataagattgatgtctttccgatagcgccagatatttcatatgagatttctgcgaatgatttctttaggtcattaatggaagacacgacagttaatcgcgtaagttggttagaaaaatggcaatgcttagagaaaaaagggcgtaaagaaattaaatgttatttggaacaagctacagatgagagtgcattcgttggtgaattgattaagaaaacatctgaaaaagatgcattatttattagtaatagtatgcctatcagagatgtagataacttgttattgaataaaaatatagatgtctatgcgaatcgtggtgcgaatggtattgatggtatcgtttcaactgcactgggtatggctgtgcataaacgaataacattattgataggtgatttatcattttatcatgatatgaatggactattaatgtcaaaattaaataatattcagatgaatattgtattattgaacaacgatggtggcggtattttttcatatttaccacaaaaagaaagtgcaactgactattttgaacggttgtttggcacaccgacgggattggatttcgagtatacagctaagttatatcaattcgattttaaacgttttaacagtgtttcagaatttaaaaatgccacattgttatctgaaacttcgacgatttatgaattgataacgaatcgcgaagataactttaaacagcatcaaattttataccagaaattgagtgaaatgattcatgacacattataaattttatgaagcaaacgttgagaccaatcaagttttagtatttctgcatggatttcttagcgacagccgtacttatcataatcacatcgaaaaatttactgataactatcatgtcatcactatagacttaccaggccatggcgaagatcagtcttcaatggatgaaacgtggaattttgattatattacgacgttgttagaccgaattttagataaatataaagataaatcaataacattgtttggatattcaatgggtgggcgtgttgcattatattatgcaattaatggtcacatccctatatctaatttgatattagaaagtacgtcaccaggtattaaagaagaagcaaatcaattggaacgccgtcttgttgatgatgcacgtgctaaagtattagacatagcaggtattgaattatttgttaatgattgggaaaagttgccattatttcaatcgcaactagaattaccagttgaaatacaacatcaaataagacaacaacgattgtctcaatcgccacataaaatggccaaagcattaagagattatggtacaggtcaaatgccaaacttatggccgcgcctgaaagaaattaaagtaccaacattaatattagctggagaatatgatgaaaaatttgtacagattgcgaaaaaaatggcaaatttaattcctaatagtaaatgtaaattaatttctgctacaggtcatacaattcatgtggaagatagtgatgaatttgatacaatgatattaggatttttaaaggaggagcaaaatgactaacagacaatgggaaacacttagagaatatgatgaaatcaaatatgaattttacgaagggattgctaaggtaacaataaatcgccctgaagtacgcaatgcgtttacacctaaaacagttgctgaaatgattgacgcattttcacgtgcacgtgatgatcaaaacgtttcagttatcgtattaactggtgaaggtgatttagcattttgttctggtggtgaccagaagaaacgtggacatggtggttatgtaggtgaagaccaaatccctcgcttaaatgtattagatttacagcgtttaattcgtattattccaaaaccggttatcgcgatggtaaaaggttatgctgtaggtggcggtaatgtactaaatgttgtttgtgacttaacgattgctgctgataatgctatttttggacaaactggtcctaaagtaggttcatttgatgcgggttatggttcaggatatttagcacgtatcgttggacataagaaagcacgtgaaatttggtacttatgtcgtcaatacaatgcacaagaagctttagatatgggtctagtaaatacagtggtacctttagagaaagttgaagatgaaactgtgcaatggtgtaaagagattatgaaacactcaccaacagcgttacgattccttaaagcagctatgaatgctgacacagatggtttagctggtttacaacaaatggctggggatgcaacattgctttattacacaactgatgaagcgaaagaaggccgtgatgcgtttaaagaaaaacgtgatcctgacttcgatcaattccctaaattcccataagttattttgaatatgatattaagtcacttgcgtcgtttattagcgacgataggtggcttttttattttataagaatttaaaagggcattttaattaattatcataaagataagatagtttgagaaaaattaatagagaaagaataaatgttaaagattattattacaatgaaaaaacgagctggtgagaaattgaattctcgccaacccgctttatgaagtgaaatcatttaaattagttatactaagcgctcataaacgattggtcgcgaagtgccaataccttgtttggatgacgtttgcatgaggatatgctgtgtatcatcataatcaagaatataaatgatttcttcattatcaatagatgaaaatttaatgcgttgatgtgccgtatctataaaaagaatatgatattgattgtgacttgtatcatcgccatgacgtatacaaattgatttttgtaattgatgattactccaattaccaatgaataaattgatattggtttgttctagatgtgtgagtttggttgtgtcgtaaactaaatttataaattgtagttgatacatagttttacctgcctttaatcaatatctatattactttttagtaacctatcattgaaccataccagttataatcacgattgaatgataaatgtaataggcttgaatctgcatcttggattgataattctgtatcccaaggattccagtaaataagtttttcttggtcattaattttagcattaccaacaactgctagcgcatgtcctaaatgtgggtcattagggttttgagatacactttgtgcaaggatcataattcctacattatcttttgtaagttgatcaacttgttcatatgatggtacgccttcttgataatgaatatctctgccttgtgatttaccgtattcaatcatttgattagggaatgttgcacaattaggaaggtcttgctcacttacttcagggtataatgtacgcataatatcatgtgcattataagtgtctgtatttttagttgcatttaataatgctgccatactgaatcctgcacaccatgagttatcgaattgttgttctctaattttgaagttttttaatgtattttcatattgaacttgatcttcttgtatcgcttcgttttcttcaactttagtaggtgttactgtattttttaactcttgtttcaattttgctgaaactgttttagcactttctttttcttttacattaccaggtagaggcgtagcttttactaatctaactttgccatcttcttcaaaataaaaccctttttcatcagtaagaacagtgatatttgaatttttatctttaatttggtctaaatctttagcgatgaagtttgaaattttaacactgtaattcatgtcttcttttgatttgtttaaatcatctttatttttaggactaagtgttaaagtataaacaattttaccgtcttttataactggataatagtaactattatcttcttcaccattaaatttataaattttaaaagcttcgccaagttcatatttaccagtttttgcattactttgtttatctaatgctttagcataaccagcaaattgttgttgtgctagatcttttactttttgaggtactttgtcactcttaacattaatttctagctgtttagagtgtgaatcggctttggctttattgttattagcaaatgcgcctagtgataaaataagcattgaaaccattatgatgcttataatattgaatactctagatttacatgaactattcatataataccctccatttaaatcaaaatattttacgttgctaagactttgcttctattttatctagacgaacttaattgttaattaagctgcatctggattgtctgaattattgttatcgccattgtctggattatcagggttgttagggttgtcagggttatttggttcatctgggttgttagggttatcaggattgttagggttatcaggattatctgggttattaggttggtcatcgttggcaaaatggatatcttcaatattttgttttaagaagttgcgtacattttcattaataaataccgcaccattaaattcatttggtacaccgccccaatgaattccgatcacttcatttttttcattaaatacaggtgaacctgaattaccaccagttgtacttaaatcatattgcatagcttcgcctttgaggtaagtgatttttcctttactttcccacattgttgctacaggtttatcaccaggatatcctgttacagtaatattttggttaacttgtgtttcagcattattactcattgttgctggtttaactacttcaccaatatgtttgttttgctcattaggggagaatttaactattgctaaatcaccttcgcctgaatatttagtgatttgttcagcagtgaaaccaccatttggataattgtcttggttaattgcagaagggaatgcttttaaagcatgaggatcaccgtgcgtagcatctacgacgtgtttatttgttaaaagagtatctttacctacaactacaccggaagcaataaatgtaccagtaggtgcttcaacttgaatataagttacgggtgcataatgaccattcgttgtatctgtgatttggtgacgatcgttatttggtaatataacatttgcgtgttcacgttgttctaatggtttaaggttaccgcctttttgaatcttaggtgtttgctgtttgcttgactgcgtttgttgtggatgattgtccatagcctttgaagataacgcgtttgctgctggagaactcacaagtgtcgctgttgtcaaagttgcaacgaataaagaactaacttttaaaaatttacctttcatctaaaaacctccaaaaaatttatttacaagttaaatataacactaaaaatttttaagtcaataagaatatataaataaattaaaaagtttttgtaaagattagagtttacaaaaacattaagggaattaaaattgaattgtattatactttattcaattgagttaaattgataagatcgtcaattgtttgcatttatctaaaagaataaataagaaaggaattgagagcgaatggaaagtatttgtttataataataaatagtaacttttgaataataattgtttggccaaaggtagattaatatgaatggtgatatattatttgagtgcttaagtttcgaagaacaattataagttagcatattaaaaccttttgatagaatcattttgagtgaggtgtttaaaggagaggaatataactcggtagtatttacagtctctatagagtattatttaaaacttatagaatataaaaaactgaacgtactatgaatttagttcacgacgtccagttcaacatatcatttttatttagtatttaaatatttagcaagtctcttcataccttcttttaaaacatccatttcataagcataggaaatccttacaaatcctttaccgaattctgtaaaggatgagcctggaacgattgctaaatgtgttgattcaagtaaatcgacacaaaattcgaaatcgtcatcggtgatatgtttaatacttgggaaaatataaaacgcgccttcaggttgagcggtaatctcaaaacctaatttagttaattcagatactaaataatttcttcgttctacataagcttcgttcatatatttaggagcttctaatccttcgttaagtgctgttatacatgctatttgagctggaacattggcaaaaatacaattataggcgtgcataaatgttaatttatcaatcaaatattgaggtcctaatagaaaaccaattcttattccggttgctgagtgtgatttacttaaaccaccaattaatattaattgatcacgaatgtcttcaaattcagcgaaggatacatgtttaccactaaatgtattttcagcataaatctcatcgctaataataaataacggatatttttttaatacatttacgatatttaaaacttcatttctttttaaaactacgccagttggattagtcggataatttaacaagacagcttttgtctttggagaaatatgactttctaatgcatcaggtgtaattttaaattgtgttgctgttgtatcaatataaattggtttaccacctagtacttcgatgagtggtatgtagcctgcataaattggtcccggtattataatttcatctccaggctctatgatagaacgtaacgttgtgtctattgcttcacttgctccatttgtcacaataatttcttcaggatcataggaaaaatgataacgatttttgaagtattgactaattgcttcgcgagtttctaataaccctttattgtgagagtatgatgtcttgtcattgttaatagcatcaatatatgcctttttcacaacatcaggcatcgggaagtctggttggccaatagttaaattaacacaatcatccaaattattcatacgatttgaaaattggcgaatacttggtgctcttaaatatttagaattagaatttaaagaaagtttcatttgtgacacctcaaatataaatcaaatattgtctaaaaatttagaaattaataatatcataacatacttttaaagcaaaaaagggtaaattacttaagctttatttgaaaaacgaaaaatgtctaaatacactgtagtaactacttttcaaaatgaataaagtggttacagttaatgtacttagacagtataaaattatgaatctttaaactgtgatggtctttgtaaattaattattggatttgtccatttacaaacaaagtttgtagataatacatatacgatgattacagatatacttattaaataaagataagtcattaatgatataggattatcgaatgggtaccattcaaatcctctaacaatgccaataattaaaccatgtaataaatatacgtatagcgtacgactaccaatataagtatataattttttctttgttgacattaaatttagaaacgcagtcattgcgattaatataattccatataatataagtcgtttaaaaggactgaatatactctgtccttcattttcaagtgaagtatatggtgaacttcccaataaccaatctgcattgataggatgaatcacgtaaacgataaaaaacaaaataaaggtaatgatagatactggtattagttttttatttttaaaaatagccgtatgttttttggtgaaaatgtaacctagataaaatattgggaaaaatacgattgtccttgaaatgcttaagtagctatcgatgttatctgaaaaacctgctccaatagatataataattgaaactgatagcactttatatggattaaatcttctaactattactaaaatgacatgaaagaaaaatagcgtgatcaaaaaccataacgcaaatactgggttaaaaggatcaagttgtaattcgtcacttttacctgttaagaaataataaattgaaaagaatgcaaaaaatatcatataaggtactatcaaacgttttgaaattttttctaaatagtatggtttatcaatatttttcgcgaaataaccagatataaacaaaaatgttggcatatggaaactataaataactaggtataatgctgataaatatttatcgccactagtgtagggttgtaacatatgtccaaatacgactaataatattaaaattgctcttgcgttgtcaaaaaaataatctctctcttttaatgaagtcatattttatctcctttatgtccataagactcttactaatttattatattttgtattagttatgcaacaaatttgtctattgtgtcgaatagtattgtaaaaattataaaaaaagcatataatattataaataatatgtagtggagtagaacaacatgtataaacaacttgaaaaacttattacactgactaacaatgacttaaacttagtgaatagaagatttggacaacgcacggatatcacatctgaacagctagaacttctccgtattttatttaattacgatcgcttatcacagtatgatttgacgatgaagattagcagggaacaatctatagtttcaaggtggattaagaaattagttttgaaagggtacatcacaagtcaacaatctagcgaagatttaagatgtaaagaattaattttgactgatcaagcacgtacattaatttcacaaataaataatgcacgttgcgaattgattgaagcaagatgtcaatgtttatcggaagtcgaattagacaatttaaatcaattacttgataagttaaatcaacgacgcatatcgttgtaacacgacaatagcaaacacataatttagtgtcgttgtgcacacaacaaaaattgaatcatgaattacaagcaaaagtagcggtgattgttaaaattgatggtaaacaatcaccgctatttttgcttgtgtatgtataaaaaagggatcaaaggtcatcccccatgattgatagtgggggatgacttttgatcctatgttcatgttgcttatttatattgtgggatgtcgaagtatttgccgacttcgccaattttatcatagtagcctttgatgattttagcattgatgttagcccaatctacatctgtagcatattggtgtgttcctggatgtgcaggattccatctcattttgtaaagtgtattttgaccagcttttacatatgagttgccgatgaatttagcaccaccaacgattgcttttgatactgtgtcccaaccagcttgtttagcatatttaataccttcacgtaaaggatcgttatcatatgcagcaataccaaatacgttatggtatttcgtgtttgagttagttacaactttgttgttcactacatctgcacctttcgctaattgagaagtaccgttacctgtttctaatagggcatgtgagataagataaacttcattaatgccatacatttgagcagctttgttaaatgcagcaccttggttttctaatacacctttaccttttaagaattgattaattttatcaatagaaatattttgtggttggtctaagcgtaagaattgatattttaatgctggatcttgagctaaacgcttcgtatccattgcatgcttaacatcattaaatttagcatctgtccacttacctggtacacgttgtacttgtggtttatattgtaaaccagcttgtatttgagcaacttggtttaatgtcatacctgtttgattatacttaattaattctttagctaaatcagttgatttaatccatgctaatttaccgttagataatttaccatagtaccaagtttgtccattaatgacttgttctttaacaactgcgaatggttgttcattaaatgcttttaatgagtatttagctgtatcagaatttggtgttacatagtaataaccattaccatttttaattacataagtgtagttataatctttggcagctgatgtagttggtttcacagcagttggtgcagttaaatcttttgcatttacccaaccagtgcggttattaatagtaccgtataaataaacatctttgcctacagatacttgtttcgttgcattaaatgtaccttgagcaatgttattgcctgttaaaatgacttggtttttagtaccccaaggaaccattgataagccgttatttgatttattaacagtatatttttgagtcgttttaacttctttgcctaagttttgaacatttaagtcttttacattgaaccaacctaatgggatgttatggcttgtattgtttaataatacatacgtttcattaccatgagcacgctcttttgttacatagaacgtacggtctgcatatttcgcaccgtttttcgctgttttttcataaacagaagcacgaataccagtgttgtttggtttaacttgagcaatcttgctaactgtttgagtcgtttgtggtttagtaacagtataagcttttacagctgtttttggttgtgctactgcttttttaggtgcagcaggtacagctaaatatgctttacttacccaaccagatttaccatttacagttccaaataaatagatagatttatcaatttgttgttgcttagtcgctttaaaagtttggttacctgtaccagaaactgcaccagcttcttgtttataagtgccccaaggtactgaatataatttagtgcctggttttactgtatatgtttgcattacatttacaggtgattttgcattgttataaataacgtcaccttgtttaacccaaccaattaaagttggactattgtaatctttaactaagtagaatttgtttccacctaaacttgcttcttttgttacagcaaatgttttttgaacttctttcgttggcttaccagttttgtcataaactgtagtgaataagccattgtttttagcattaatttgagcaacaccgtttaatgatgaaactgttaatttattatttgttgtaggtgttgatggcttaggtgttggtgtaggcgtaggtttagcagtatcaactaaatatgctttacttacccaaccagatttaccattcacagagccatataaataaattgatttatcaatttgttgttgctttgaagccttaaatgtttggtttccagagccagacacactaccagcaacttgtttagatgtaccccaaggtactgtataaagtttcgtaccaggtttgattgaatatgattgatttacatttacaggtgatttagctgtgttgtaaaccacatcgccttctttaacccaaccaaatttattaccagaattgtaatcttgaacaagatagaatttttgattacctaatgtagctgttttagatacagcaaatgttttttgaacttcattagttgctttaccagttttgtcgtatacagtagtatataaaccactatttgttggtttgatttgtgcgacaccattgtttgcagcaactgttaatttaccagttgatggtttcgacggtgttgttggttttgatggtgtagtaggggtagttgtagattgcgtaccccatggcgccactttacccatttttattaaatatttttcattaattaagtcatataattgatcataactataattatgacttcttaaatatccatgtggatcggcatggtcagtaccacctaaatatttacttacagcgtagtgagtccatactgtaccatttccatcatactcagcactgtctggttttaaaccataatattgtaattgtgtagctgcatagtcagcatagttattcattgaacgtgcaaatgaagcatagtcgtgtgtgtgtacgatttcaacattgatgaatctagggttaccgactgcaccgacaccccaagataagtaatccgttggtgctgtttcgattatacgatccccatcaacaaatgcatgtacgaatgcgttttgatagttatttttcatataactaatttcaccatttatcgtcgaacgatcattagctgtatcatgaactacgataccttcaggacgacctacgccgttacggtatgcgtatttagggaagtaagatgtataatcttcttcaattttaggtgcttttaagttatttttacaaatgtaatcgttaattgaagagtttacttgtggtttatattttggcaaactcgtttttggtgttgcagcaactgatcttggttgtgctgaagcgctaaaagtagttactttaggtgtcgcttcagttttagctttaggtgctgatgtagttgcagctttaggtgctgcggttttatattgcgtttcaagagctgcaggtttagcagctgatttaattaattctggattaatttgattttctgaattatcatcttcatcatcaactaaactataaccagcatttgtaacattagtgttagttttaggtgctgtagtgcttgttgactttgcaacaggctgcgtattatttgtagtcgctgattgattagcacgagtgtcaccatttacttgtgcagtatcaactttttgacttacttgagcattgcctgttttgttatttgctgtttttggttggacaatagcagggtcttgatatacttgagtgccagaaatgttttgcgttggattttttacctcagcttttgcttgttcagtagttgctttaactttattactatctaaaacgtttttattagtagtttgatcttgtgtcgtctcagctgcttgaacttgatgtgcagtgactgctgaacctacaagcgttaatgcaaccattgatggtagtttgtaattgaattttttcgccattctatttattactcctaacatttattaattattactaacattatagtacctgttttatatacctgtgcgtatttaaccaatttgtaatatactcttaatttacattttcactgtaaaaaaatgaaaaaaattttgaatctcaatggtgacgtgacaaatcaaatagaattgatgtcaatttaagaattggtttattacaaatgtttctaaaatagatacaactttttttaattaagcgaggttaacttttttgtcatttcaatatgctcgatgccttcctcaagaaatatattacctctcattttaaagtttaaactttcataaaatgggatagcatgacattgggcattcatagtagctacgtaaaaaccttcatctttagctaatgattctacagcttgcataagcattctacccattccttgtccacgatgtgatttcatcacagctactcgttctattttgacagttgtttcattaatagggcgtattcgagcagtggcaactggctgtccattatcatatccaatgaggtgaatagattcagattcatattcatcaatttcactttcctcagggacgccttgttcttctacaaacactttctttcttatatagaagcaatcttctaacatcttttgattgtttacttttgaaaacataaaattcctccacatcctaacaaaatcatttacatttaatttactaataataacatagaataacgattgttattttcctcaaaaataattagacataaaaaagctataaagatgattgttgtgaatcatctttatagctaattaattattaatgttatagtgcttcttttctaataattgctgtatattgccaaaagattcgcatttgagcaatattccaattattcattcccattgtaaatcctgaaggcttaaatatattcacatcagttacttctaaagctgctgcaactaaatattgtaatggaatgctaagtgatttcattgtttcggtaatgccattttcatcatatacccatgaaaatggtaactctgattcgaaaacatcaacactattgaaaatttcaggtagggctaaaatataacatgcaccatctacaataggattgtcgatactatttttgtaataaattaggagtgcttcatagttttctcgatgctcatgattgacgtaaaaaaattcacttctaaaatgagccatatcttggctatgaatgatttgttgttctaacatattaaacatgccatttatatttgcaatcttttcgtatgtttttctactcatgtatgatgctcctttcataaatagtaaatgttaatcgtcatataatattaatttacaacaccattttggttatttgaagcttgtggcgcttgttgtgtgccaccttgattttgatttgagttttgatctgtagcaggttgttgttgattgctggaatcactgttattagttgaatcactgttctcgttagatgtcttatctttatctgtcgtatcattttgttcttttctcaataaactattatctaaaggcgttaatggtattaatgaaccataatgattaatgacacgttgatctaagaaatcatttttatcattaataggtgataattctaagtctttacgaagtaagtttgcatatttttgaatgctttcaacacttggatgataatagtaaataccatttaacatatcatctttaccttttaattgcgcagttttaatttcaacatcatttgttaagtacatttttgctaaagctttaatttcagagttagttaaattatgctttgcatttttacctacaatttgaatcacgttatcaagtttatcaatagaatcaacttcctgtgctttttggaataaaatcttaattaattccatttgacgttgtccacgttttaagtctgaatcatgatgtctagttctagcaactgctaaagcctcatcaccatttaatttttggtacccttttttaattttaatcttaccagtatcatctgtgttaggttcatttaagtcgtatggcacatcatagtatatgccaccaagctcatttacagcctcgacaaatgctttcatattgactctcacataataatcaacaggtacattcatggtagcttctaccgaatccattgcggcaattggaccaccatatgcatgtgcatgggtaatcttatcgtaatagccaactttaggaatgtagctgatagtatcacgtggaatactaagcattctaatttgatgttttgattgattaaaagtagttaaaatcatagcgtctgatctagagtgttcagcatcctgtcctttttttcttcttccatcgttatcatcgatacctaagaaaagaatagagataggttgttcttcgggattgactttattatctcttaagttggattgacgattagcatttttgctgtcttgagaagattcgaatgcatcttgggacgttttaaaaagtaacgtagcgaagactattggaacaacaatgagaaccaatgctagaaggatcaaaaagtattttaaaaatttattcatgattgatgctcctatattaaatttttgttaaatcataatcataattttaaaatataattagttgaacgatatttatacaacttcattactaatacattatagccttaaattgtagtactttatagtaaaaaatacaaatgttatgtcaaagttccttgtaatttgaatgttttgttaaaatcaaaaagcatttttaaaaatataatgcgactttagtatgatgtcttaaaaaatttaaaggcgtaatataaattcgagtgatttatacaaagtgataaggtataattaattttgttgtatagataacatattagaaaaacttattactatgtagcgtaaagcataaatgaatgataagttaatttttgtaagttgtattattaggcatctaggttcaaatttttaacgatttaaatatataaaatgaatacattgtgaggcaattatcaaatgaaatttaataaagtaaaactagttatacatgcgtgtgtactattatttatcattatttctatagcgttaatttttcatcgattacagacgaagacacattctatagacccaatacataaggaaacaaaattatcagacaatgaaaaatatttagtggatcgtaataaggaaaaggttgcgccgtctaaactaaaagaggtatataatagcaaggatcctaaatataagaaaattgacaagtatttacaaagttcattatttaacggttcagtagctatatatgaaaatggcaaattgaaaatgagtaaaggttatggatatcaagattttgaaaaaggtattaaaaacacaccgaatacgatgtttttaataggttcagctcaaaaattttcaacagggttactgttaaaacagttagaagaagaacataaaataaatatcaatgatccagtaagtaaataccttccatggtttaaaacatctaagcctatcccattgaaagatttaatgttgcatcaaagtggattatataaatataaatcctcaaaagattataaaaatttagatcaagcagttaaagcgattcaaaaacgtggtattgatcctaagaaatacaaaaagcatatgtataacgatgggaattatttagtacttgcgaaagtaattgaagaagttacaggtaaatcttatgctgagaattattatacaaaaataggagatcctttaaaacttcagcacacagcattttatgatgaacaaccttttaaaaaatatctagcaaaaggttatgcttataatagtacaggactttcattcttaagacctaatattttggaccaatactatggtgcaggtaatttatatatgacaccaacagatatgggtaaattaattactcaaatacaacaatataaattattcagtcctaaaataaccaatccattattacatgagtttggtacgaaaaagtatccagatgaatatcgatatggtttctatgctaagccaacattgaatagacttaacgggggattctttggacaagtctttactgtttactataatgataagtatgtagttgtacttgcattaaatgtaaaaggaaacaatgaagttcgaatcaaacatatttataatgatattttaaaacaaaataaaccttacaatacgaagggtgttattgttcaataattaatatagaagatataacatgtatatggcattaaggcatcgaccttatctgaccagtatacgagttatatcttcttttttatagtggtaaaaagtttaaagtataaggttgaagaaggatgagtttaaaaatatgtgttaactgataaaaggggaaatcatttggtgagttggcatcagactaaaatgaatgaagacgaatacgttggtccatgcgtggtgtgaatgttttctaaatctaactggaaatgataatttaataatgtacacttttgattgtttaaacatgtacaatttttaaaaacctagggataattttattgacgtgaacaacattgagattatctttagacataaatatggattttgaagttactatatttattagttgtggttgttaatgtattaattgaattgattataatgattgtcttataagatatagaaggggacttaaccatttaaaaattgaaggaaaataaaaaccagctaacaaaagtgttagctggttaaactttacattattaaaatgttgtttataagtgtgaagagtgaccgccttgcataacccaatatgttccgacaacgaaacaaagtgtaattacaagagcaaagataactttgaatgtttgtaaacgtccatctttaccttcagttaaatgcatgaacattaataattgaagtcctgcttggacgaatgcaaagccaaagataattgtcaacttcgcgtggaatgttaatgacgtgtatagtgttacgtaaactgctaaaagcgttaatacgatagatgcgataaatcctacagtatgtttcattattgtactcatccgctatacaccatccctatcatatatacggcagtaaagatgaaaacccaaacaacatctaagaagtgccagtataaacttactataaataattttggcgcattatatttgtctaatccgcgtcgttggatttggattaataaacaaatggcccaaacgatacctagcgatacgtgacaaccatgcgttcctaataggataaagaaactagaccagtaagaaccaattgttgggttaacgccttctgatgcatagtgtgcgaattcataaatttcgaatccaacaaagactaaacctaaaagtaacgtaatgatcatccaaaacatcattaacttttgtttttcttggcgcatgtagtaaatagcaataccacatgtgtaagaactgaataataatgcaaacgtcattattaaaacaagaggcaattcaaataactcagtagtcattttacctgcataatcgccaccatgttgcaaagttaatagtgtcgcaaatagggtaccgaataacgcaaattcggctgtaatgaaaatccaaaagccaagcttatttaattcgccttcatgtgtgcgtgaatcaatagtgtttgtatcatgactcatgacttacagcctccctttctttaatacgcgcttctcttaatctagcttcagtttctgcaacttcagcagcagggatatgatatccgtgatcgatttggaaactgcgataaatcatagtaccaaaaataccgaataaacaaattaatgctggaattacagtttcgaaaattaagaagaaaccgccgatagtcataaagataccaatccagaatccaacaggagtattgtttggcatatgaatgtctttgtaattatggttgtctaagtaatgacgaccatgttctttcatatcaacaaatgtgtcgtagtcattccaatctggtgtaatggcaaagttgtatttaggtggaattgctgatgcagtagtccactctagagtacgaccaaggccatcccagttatctccagttgcttcacgtggagatttgaagtgactgtatacgatactaacaacaaggaataagaatccgattgccattaataatgcaccgatagttgaaattaagtttaataagaaccaaccatctgatggcatataagtgtataaacgacgtggcataccatctaatccaagaatgaattgtggtaagaaacaaacgttaaatccgatcatgaagaaccagaagcaccatttgtttaatgtttcgtttaatttgtaacccatcatctttggataccagaagattaaaccagctaagcaggcaaatacaacaccagtaaccaatgtatagtggaagtgagctactaagaagtacgtattgtgatattgatagtcagctgatgccattgctaacattacacccgtaacaccacctaaaaggaagttagggataaatgctaatgagaatagcattggtgactcaaatgtaatacgtcctttatataatgttaataaccagttaaacaatttcacaccagttggaataccaatcagcattgttgaaattgagaagaatgagttgattaacgcaccattacccattgtgaagaaatggtgaacccaaactaagaaactaaggaacgcgataccggcagttgcccataccatactttgatgtccgaataaacgcttacgagcgaatgtcgggataatttctgagtaaataccaaatgctggaaggataacgatataaacttcagggtgcccccatacccagaagaagttagcccaaagcattggcataccgccatgtgcaactgtgaagaatgctgtgtcaaatattctatcagttgtcattaatgctaacgctactgttaaaggagggaaagcaagaataacaattaatgtagtaataaatgttgttactgtaaacattggcatttgcataaacttcatagttggtgttttacatcttaaaattgttacaaagaagttgatacctgtagctaaggtaccaagccctgaaatttgtatagctattaagtaatagttaacacccggaccaggactgaattcacctgctagtggcgcatagtttgtccaaccagctgctggtgaaccaccaataataaatgacaggttgaataaaatcatacctgcaaagaatagccagaaacttacgttgtttaatactgggaatgcaacatcacgtgctccaatttgtaatggaacaacgatattccataaaccaaagataaatggcattgccatgaagataatcatgattacaccatgtgtactaaaaatttcgttatagtggttagattctaaaaatttgttatcaggtactgttaattgcgcacgaataagtaacgcatcaataccaccacggacgaacattaatacggcacagattaaatacataataccgattttcttatggtctacagatgtgaaccattctttgtaaagatatttccataatttaaagtaagtaattactgcgattaaaccaataactaagaatggggcaccaatttgtgccattgtaatcatccagttacctttaactagtaattgatcccatggaaaattcattaatgtccacctccatgatcatcattgtcttgatcttgcgcatcttttgaaattttcttcatttctttcgcatttttcgattcatctttcttgaactcattgttatatggttcgtcatttccaagaatcatcaacttcataccatgtcgtttatagttcgcatttgtaatttgagctttacgagcaggtattaatggtttgtctgatacatctttaaacatattttcttcactagtgaagtttggatctttcaattcgaaattgaaacgtttatatgcatagaagatgtattctggatcggctgctggatcaacaaacgccatatgtgtaccattaaattctaaagttttattaggtgtgcttggtaataattgtttatcaaatgtatcttgatctaacgttttcttacctttaacttctttcacccatttgtcgtagtctttttgactaacggcatttactttaaatgtttgacgtgagaatccttcaccattgaagttagagttacgacctctgaacgtaccagtttgagatgcttctaacgtccaattcattgtcatgccagtcatggcatatttttgaccacctaattgtggaatccagaaacttgtcattgtatccatagcttgaagcttaaatacaacaggacgatctttagggattgttaatgtattaacagtctctatatgttcatctggataagcaaagaaccatttgtatcctgcacttactgcatatacaaccattggatctttctcactcttcggtggtttttcgtaatcgtataaagttttaactgtaggaatagctaaagcagcaacgattatgataggtattacaaaccatattgtttcaatgatggcattatggtgcatcttaccagattcggcattcttattataactatacttgtaaataaaaatggcgaacatgccaagtacaacgaaacaaataacaagcatgaagacgattgaataaagaatcaagaacttctgactacttgctactggcccttttgcgttgaaaatttctatatttgaacaaccactaagtaaaattagtgtgccaaataatagaagcaaagacttaaattttgacacttttttgacctcctaatactacaaatgtagggcttaacattaattttaagttattacacaatatttacaagggcttatgggaaaaaaattaataaaattgtatcaaaaatgttgataaatcaaggtgtgacgtgggttcacacatttgttaaaattatgtgtacattttgtgactaatagcgtttttgaaaaaattgcttcatatttaaaaggaaagttgagaatagctttcaattaaaggttaattgaatgaaaataaaaaaagtttgaaattgtctaataaattgaaaatgatggctagttgattgaaaggaagcgcaaacattttaataaggaatttgccaaaagtaatttatcgttaaacaatgaaaagtggaaatttgtttgttcaaaatcaaaacatttttttaaaaagagcagttaagttttaataatttgataggtagtcctttggtatacagaaaaaatacaatatttgggttaaagttgcagatgaagttagaataacaaataaaatggtagcaaaacatgttcgtttgctaccattttatttgcagtatagtgatgagggctatttaacctcaatatacctagtggaaattttaattgcaccatctgaatcagtgacatgatatttaatttgatatttaccagatttagatgtatcaatttggccatcgactttaattttatcggttaaatctccatcttctttatcaaatgcacttatgccgtttagaaggttataatcttgacctttcttaataacgatatcattagcgcctttaatttgtggtgtagtattcgtcgttgcatctgcatttaaatttggtgttactagtgtagcagaaacaccgagggctgataatgactgtaatagtttattcataatgtaacctccgaatgataagtcatttctgagttagctttactataccttaatttatattatttacacatcatactatagtcctaatcttaccctataaagaatgaaatttaaatataaatttataaataatgaggaaataattattattttgaaaatctgccacaattgtaaaattaataatttagggataatttgaaatcaaatataactttattcgacagtttgaacttaaatttttgtgtatcaaaacaataagaaaagggaggcgaaaatgataaagaaccactaatgattaactatgtagtagtactttatcatagtcacagcttctgtgttggggcccatccccaacttgcacattattgtaagctgacttttcgtcagcttctttgttggggcccctgactagaattgaaaacttgttacaagcttattttcattcaattaactactgtctatataaaattgttgagccaagtacaaagtgaaatgctcccttcaaagccttcatttattcaatgtctactttgaagggagcatttgatcgattaatgtcccagatttttcttgttattcattgcaattgcaaaataatatttaatgtgggttaaaagacttcattaaaactcagttattagggagtgggacagaaatgatattttcgtaaaatttatttcgtcgtcccaccccggcaaggttgactagaattgaaaaaagcttgttacaagcgaattttcgttcagtcaactactgccattataactttgtagagcatagaacattgatttatgtctcaggctctttacgaatcaatacctcgacgcattttttctgcaagcaaagtattatttaataccatagtaattgttaatggaccaacgccaccaggaactggtgtaatagctccagcaatttctttaaccgcatcataatcaacgtcaccttttaatttgccattttcatctggcgtattgccaacatcgataattactgctccttctttgaccacatcttttgttactaaaccaggcttaccaactgcactgacaatgacatcagcatcttttaaatatgatgccatatcttttgaacgagaatgtaagattgttactgatgcatttttttgaagtagtaacttagaaactggttgtccgacaatatgacttcgtccaattacaactgcatttttaccttctaaatcaatatcagcatgttttaatatttccatgatgccgagcggtgtgcaaggtacaaaagtttgttcatcgatatataatttccctatatttattggatgaaaaccgtccacatctttttcaggattgattgcttctaatattttctgttcgctaacttgttttggtaatggtacttgtaccaaaataccacttacagaatcatcattatttagtctatttagttcgtttaatacttcttcttcagtagctgtttcttccaaatgtacgatttctgaaatcataccaattttttcagctgctttcttttttgatctaacataactttgactagcgccatcattaccaactaatataacggataatttaggtgtaaaacccttttcttttagcgcttcaacttgatcttgtaacccctgtctgtagtctttggcaatttgtttaccatctaaaattttagcaaccataaaaacttctcctcctattgtcaatatcctaactttgttagtttataaaactaatttacatagcaaaagacgtaaattcaaataaaaaatcaaaataaagttcgatttttgattgaaaaagcagaaattgcttgttatgctatatctataatatacaactaaagtaattcacaattcaaacttttgaaagggtgtacaaagtgaaagtagcagtcattatgggcagttcttccgattggaaaattatgcaagagagttgtaacatgttggattattttgaaattccgtacgaaaaacaagtagtatccgcacatcgtacgccaaaaatgatggttcaatttgcttctgaagcgagagaaagaggtataaacattatcattgcaggcgctggcggtgcggcacatttaccaggtatggttgcatcattaacgacgctaccagttattggagtgccgattgaaacaaaaagtttaaagggtatagattctttattatcaattgttcaaatgccaggaggtattccggttgcaacgactgcaattggtgcagcaggtgctaaaaacgcaggtatacttgcagcaagaatgttaagtattcaaaatccttctttagttgaaaaactaaatcagtatgaatcttcgttaattcaaaaagtggaggacatgcaaaatgaacttcaataaattaaagtttggtgcgactattggcattattggtggtggtcagcttggaaagatgatggcacaatcagctcaaaaaatgggttataaagtggttgtattggatccttctgaagattgtccatgtagatacgttgcacacgaatttatacaagccaagtatgacgatgaaaaggcactcaatcaattaggacaaaaatgtgatgtgattacttatgaatttgaaaacatttcagcccaacaattaaaactattatgtgaaaagtacaatattccgcaaggttaccaagctatacagttattacaagatcgcttaactgaaaaagaaacattaaaaagtgctggtaccaaagttgtcccgttcatttcagtaaaagaatctacagatattgacaaagcaattgaaacattaggatatccttttattgtaaaaactagatttggtggctacgatggcaaaggtcaagttttaattaacaacgaaaaagacttacaagaaggttttaaattaattgaaactagtgaatgcgtagctgaaaaatatttgaatatcaagaaagaagtatctcttactgttacaagaggaaacaacaatcaaatcacttttttcccattacaagaaaatgagcatagaaatcaaatacttttcaaaacaattgttccagcgagaatagataaaacagctgaggcgaaagagcaagttaataaaattatccaatcgattcatttcattggaacatttacagttgaattttttatagatagtaacaaccaattgtatgtgaacgagatagcaccaaggcctcacaattccggacattattcaattgaagcatgtgattattcacaatttgatactcatattttagcagttaccggacaatcattaccaaattcaattgaattattaaagccagcagtcatgatgaacttactaggtaaagatttagatttattggaaaatgaatttaatgaacatccagagtggcacttacatatttatggtaagtctgagcgtaaagatagcagaaaaatggggcatatgactgtactaacgaatgatgtaaaccaaactgaacaagatatgtacgctaaatttgaggggagtaattaaagcatgacattattatatgaaggaaaagcgaagcgcattttctcaacaaatcaagaaaatgaattaagagttgaatataaagatgaagttactgctggaaacggggctaagaaagacacaatggcaggtaaggggcgattaaataatcaaattacttctattatatttaaatatttacaagaaaatggaatagaaagtcactttattaaacaattatctgaaacagaacaattagttaagcctgtgaaaataattccattagaagtagttgttcgtaatattgctagtggatctattacaaagcgtttaggttttgaaaatggtgaagtttttagagaaccacttgtagaatttttctataaaaatgatgcgttaaatgatccgttgataacggatgaccatgttaaattgctcaatatagcatcagatgaagatattgaaatactaaaatccaaagcattaaagattaataatgtgttgaaacaattaatggatgctatgaatttaaaattagtagattttaaaatcgaatttggaaagactgagactggtcaaattttgttagcggatgaaatatctccagatacatgtcgaatttgggataaagctaccaatgcaaactttgataaagatgtatatagaaataacactggatcactgattgaaacatatcaaatatttttaaacaaattggaggatttaaaataatgaaaacaattgaactacatatcacattacaaccacaagtattagatacgcaaggacaaacgcttactcgagctgtacatgacttaggttatgcacaagtgaatgatattcgtgtaggaaaagtattatatatgacagtggatgaggttagtgatgaaaaggtacacaacattattacaactctaagtgaaaaattgtttgcaaatacagtgattgaagaatatagctataaagtgttagatgatgaaaaggagaatgcataaaatgaaatttgcggttcttgtttttccaggttcgaattgtgatagagacatgtttaatgctgctattaaaagtggtgttgaagcggaatatgtagattatagagaaacatcactaagtggatttgatggcgtacttattcctggtggattttcattcggggattacttaagatctggggcaatggctagtgtagcgccgattatttcggaagttaaacgtcttgcagctgaaggtaagccagtattaggtgtttgtaatgggtttcaaattttaactgaaataggcttattacctggtgcattattgcataacgattcacatttatttattagtagaaatgaagagttagaaatagtgaataatcaaacggcatttacaaatctttatgaacaaggtgaaaaagttatatatcctgtagctcacggtgaaggtcattattattgtactgatgaaatatatcaacaattaaaagctaacaatcaaattattctgaaatatgtgaataatccgaacggttcatatgatgatattgcaggaattgttaacgaaaaaggcaatgtatgtggcatgatgccacatcctgaaagagctttagaaacgttgttaggtactgatagtggtgtgaaattatttgaagcgatggtaaaaagttggagggaacaacatgtctaaatttatcgaaccaagcgttgaagaaattaaacttgaaaaagtatatcaagatatgggattaagtgatcaagaatatgaaaaagtttgcgatattttaggcagacaacctaactttacagaaacaggtatcttttctgttatgtggagtgaacattgctcttataaacattctaaaccgtttttaaagcaatttcctacgtcaggtgaccatgtgcttatggggcctggtgaaggtgcaggggtagtcgatataggtgataatcaagccgtagtatttaaagtagagtctcacaatcatccatcagcaattgaaccatatcaaggggctgctacaggcgttggtggaatcattcgtgacattgtctctattggggctagacctattaatttgttaaacagtcttagatttggagaattagataataaacaaaaccaaagattacttaaaggtgttgtaaagggtatcggaggttatggtaactgcattggtattccaacaactgctggtgaaatcgaatttgatgaacgttatgatggcaatccacttgttaatgcaatgtgtgttggtgttatcaatcacgacatgattcaaaaaggcacagcaaaaggtgtaggtaattcggtcatttatgttggtttgaaaactggtcgagatggtattcatggtgctacttttgcatctgaagaattgacggaagaaagcgaaagtaaacgaccttctgtacaaatcggtgatccatttgtaggtaaaaaattaatggaagcaacacttgaagcaattacatttgatgaattagttggtattcaagatatgggtgctgctggtttaacatcttcatcgtctgaaatggcggcaaaaggtggtagtgggttacatttgagattagaacaagtgccaacacgtgagccaggtatttctccttatgaaatgatgctttcagaaactcaagaacgtatgttactagttgttgaaaaaggtactgaacaaaaattcttagatttatttgataagcacgaattggatagtgctgttataggtgaagttacagatacaaatcgttttgttttaacatatgatgacgaagtttatgctgacattccagttgaaccactagctgatgaagcacctgtatatattttagaaggagaagaaaaagattataatacttctaaaaatgattatacacacatcgatgttaaagatactttctttaaattacttaagcatccgactatagcatctaaacactatttatatgatcaatacgaccaacaagttggtgccaatacgataattaagccaggacttcaagcatcggtagtacgtgtggaaggcacaaataaggcaattgcttcaacaattgatggtgaagcgcgttatgtatataacaatccatatgaaggtggaaagatggtagtagctgaagcttatcgaaatttaattgccgtgggtgcaacaccattagcaatgacagattgtttaaattatggttctcctgaaaagaaagaaatctatcaacagttgatagattcaacgaaaggtatggcagaagcatgcgacattcttaagacaccagtagtttctggtaatgtatctttatataacgaaacgaaaggtacttctattttcccaacaccagttgttggaatggtaggtttgattgaaaatgtaaattatttaaatgattttgaacctcaagttggagataaattatatttaatcggtgatactaaggacgactttggtggtagtcaacttgaaaagttaatttatggcaaagttaatcatgaatttgagtcattagatttgagttcagaagttgaaaaaggtgaatcaatcaagaccgctattcgtgaaggactattatcacatgttcaaacagttggtaaaggtggcttactgattaccttagctaaactaagtgcgcattacggtttaggattaaaatcttcaatagatataacaaatgcacaattgtttagtgagacgcaaggccgatatgttgtttctgttaaatcaggtaaaactttaaatattgataatgcaatagaaattggacttttaacagatagtgataatttcaaggtaacaacaccatatacagagattagtgaaaatgtttcagatattaaacaaatatgggaaggggcaattgctcaatgtttaactactcaggattaaacgaagaatgtggcgtgtttggtatttggaatcatcctgaagcagcgcaactaacatatatgggacttcatagtttgcaacatcgtggtcaagaaggtgcaggtatagttgtttctgatcaaaatgaattaaaaggcgagcgaggattaggcttactaactgaagcgattaaagatgatcaaatggaacgattaaaaggatatcaacatgcaattggtcacgtccgttatgctacttcaggtaataaaggtattgaaaatattcaaccgtttctgtatcacttttatgatatgagtgtaggtatttgtcataatggtaacctcattaatgctaaatcattgcgtcagaatttagaaaaacaaggtgctatcttccattcgtcttctgatactgaagtcattatgcatttgatacgtcgaagtaaagctcctacttttgaggaagcgttgaaagaaagtttgcgaaaagttaaaggcggttttacatttgcgattttaactaaagatgcgttatatggcgcagtagatccaaatgctatcagaccacttgttgtaggtaaaatgaaagatgggacatacatccttgcaagtgaaacatgtgcaatagatgtgttaggtgcagaatttgttcaagatattcatgcaggtgaatatgtcgtgattaacgataaaggtattacagttaaatcttatacacatcatacgacaactgcaatttctgcgatggaatatatttattttgctagaccagactcaacaatagctggtaaaaatgtccatgcagtacgtaaagcttctggtaaaaaattagcccaagaaagccctgtaaatgctgatatggtcatcggtgtacccaattcatcgctatcagctgcgagtggttatgctgaagaaataggtttgccatatgaaatgggactagttaaaaatcaatatgttgcaagaacatttattcaaccaactcaagaattacgtgagcaaggtgtgagagtgaagttatctgcggtaaaagatatagtagatgggaaaaatatcattcttgttgatgattccattgttcgcggtacgacaattcgacgcattgtgaaaatgttaaaagattctggtgcaaataaagtgcatgtgcgtatagcatcaccggaatttatgtttccaagtttttacggaatcgatgtttcaactacggcagaattaatttctgcaagcaaatcacctgaagaaattaaagattatattggcgctgattcattagcatatctatctgtagatgggttaattgaatcaattggtttagattatgacgcgccatatagtggcttatgtgtagaaagtttcactggagattatcctgcagggttatatgattatgaagcaaattataaagcgcatttaagtcatcgacaaaagcaatatatttctaaaaacaaacacttttttgatagcgagggaaatttaaatgtctaaagcatatgaacaatctggtgtaaatattcatgctggttatgaagctgtagaaagaatgtctagtcatgttaaacgtacgatgcgtaaagaagttatcggtggtttaggtggattcggtgctacatttgatttatcacaattaaatatgacagcgccagttttagtttctggaacagacggagtaggtacgaaattaaaactagctatcgactatggtaaacatgattcgataggtatcgatgcagtcgcaatgtgtgttaatgatattttaacgacaggtgcagaaccattatattttttagattacattgctacaaacaaagttgttcctgaagttattgaacaaattgttaaaggtattagtgatgcatgtgttgaaacgaatactgcacttatcggtggagagactgctgaaatgggtgaaatgtatcacgaaggcgaatatgatgtagctggatttgctgttggagcagttgaaaaggatgactatgtagatggttcagaagtgaaagagggacaagttgttatagggcttgcgtcaagtggcattcattcaaatggatacagtttagtgcgcaaattaattaatgaatcaggcattgatttggcatcaaacttcgataatcgtccatttatcgatgtctttttagaaccaactaaattatatgtcaaacctgtacttgctttgaaaaaagaagtttctattaaggcaatgaatcatattactggtggaggtttttatgaaaatattccacgtgcattgccagccggatatgctgctagaattgatactacatcatttccaacaccaaaaatatttgattggttacaacaacaaggcaatatagacacaaatgaaatgtataacatttttaatatgggtattggctatacggttatcgttgatgaaaaagatgtatcacgcgctttgaagattttagcagaacaaaatgtggaagcctatcaaattggtcatattgtgaaaaatgagtcaactgcaattgaattgttgggggtataacaatggttaaaattgcgatttttgcatcaggttcaggaagtaactttgaaaatatagttgagcatgttgaatcaggaaaacttgaaaatattgaagttacggcgctatatacggatcatcaaaatgcgttttgtatagatagagcaaaaaagcacgatattcctgtttatattaatgaaccaaaacaatttgattcaaaagcagcgtatgaacaacatttagtaacattattaaatgaagataaggtagagtggattattctagctggctacatgcgtctaattggtccagacttattagcttcatttgaaggtaaaatattgaatatacatccatctctattgccgaaatataaggggattgacgcaataggccaagcatatcatagtggcgatactattactggttcgacagtacattatgttgatagtggtatggatacgggagaaattattgaacagagaaaatgtgatattagaccggacgattcaaaagaacaattagaagagaaagtaaaaaaattggaatatgagttatatccaagtgttattgctaaaattgtaaaataaggagtatgtatgtgatgaagaaagctattttgagcgtatcaaataaaacaggtattgtagagtttgctaaagcgttaacgcaattaaattatgaattatattcaacaggtggtactaaacgtatattagatgaagcaaatgtaccagttcgttctgtttcagacttaacacattttccagaaataatggatggccgtgttaaaacattacatccggctgttcatggtggcattttagctgatcgaaataaaccgcagcatttaaatgaattatcagaacaacatatagatttaattgatatggtagtagttaatttatatccattccaacaaactgttgcaaaccctgatgtgacgatggacgaagcaattgaaaatattgatattggtggtccaacaatgttacgtgctgcagctaaaaactataaacatgtaacaacaattgtacatccggcagattatcaagaagtattgacgcgattaagaaacgattcgttagatgagtcatatagacaatcattaatgattaaagtttttgagcatactgcagaatatgatgaagcgattgtacgtttctttaaaggggataaagaaactttaagatatggagaaaatccacaacaatcagcgtattttgtgagaacttcgaatgctaagcacacgattgcaggcgctaaacaattacatgggaaacaattaagctataacaatattaaagatgcagatgctacactagctttagttaaaaagtttgatacacctgctacagttgcggttaaacacatgaatccatgtggtgttggtatcggtgacacgatagaacaagcatttcaacatgcgtatgaagcggatagtcaatcaatatttggtggaattgttgcattaaaccgagctgtaacacctgagttagcagagcaattgcatagtatctttttggaagtcattattgcaccaaaatttacagatgaagcattagatattttaaaacaaaagaagaatgtaagattattagaaattgatatgactatagacagtaacgaagaagagtttgtttcagtatctggcggatatttagttcaagataaagacaattatgtcgtgccaaaagaagaaatgaaagttgttacagaagtagcacctacagatgaacaatgggaagcaatgttattaggatggaaagttgtaccatcagtaaaaagtaatgcaattattttaagtaataataaacaaactgtaggtataggtgctggacaaatgaatcgtgtcggtgctgctaaaattgcgttagagagagctattgaaatcaatgatcatgtagcgttagtatctgatggatttttccctatgggagatacagttgaacttgcagcacaacatggtataaaggcaattatccaaccgggtggttcgattaaagatcaagattcaattgatatggctaataaacatggtattgcaatggtagtcacaggcactcgacattttaaacactaattttaaaggggcgtaacataaatgaatgtattagtaattggtgctggtggacgagaacatgcacttgcatataaacttaatcaatcgaatctagttaaacaagtgtttgtcattccaggtaatgaggcaatgacacctatagctgaagtacacactgaaatttcagaatctgatcatcaagcgatactagattttgctaaacggcaaaatgttgattgggtagttataggtccagaacagccgctaattgatggattagcagacattttacgagcgaatggtttcaaagtgtttggtccaaataagcaagcagctcaaatcgaaggctcaaaattatttgctaaaaagataatggaaaaatataatattccaactgctgattataaagaagttgagcgaaaaaaggatgctttaacatatattgaaaactgtgaattgcccgttgttgtcaagaaagatgggttagctgctgggaaaggcgttattattgcagatactattgaagcagccagaagtgctattgagattatgtatggtgatgaagaagaaggtactgttgtatttgaaacgtttttagaaggtgaagagttctcgctaatgacatttgttaatggtgatttagcagtacctttcgactgtattgcacaagatcataaacgcgcatttgatcatgatgaaggaccaaatactggtggtatgggggcttattgtccagtaccacatattagtgacgatgttttaaaacttacaaatgaaacaattgcacaacccattgcaaaggcaatgcttaatgaaggttatcaattcttcggtgtattatacattggtgctattttaactaaagatggtccaaaagtaatagaatttaatgcccgttttggtgatcctgaagctcaagtattattaagtcgcatggaaagtgatttaatgcagcatattattgatttagatgaaggaaaacgtactgaattcaaatggaaaaatgaatctattgtaggggtcatgttggcatcaaaaggatatcctgatgcatatgaaaaagggcataaagtaagtggctttgatttaaatgaaaactattttgttagtggattaaagaagcaaggtgatacctttgttacttcaggtggtagagttatacttgccatcggaaaaggtgacaatgtacaagatgcacagcgagacgcatacaaaaaagtatcacaaatacaaagtgaccatttattctatcgtcatgacattgcgaataaagcactacaacttaaataagtaaatttaaaatactaagattagctatgaacgaatctataacgatagattttttcatagcttttttagttgtagagtctaggacattgatttctgtaccaaatttgtgattatgcatatgtaatacaaaagaggcgccacaacatgtttggatgaacaaaataacatgtttgtggcacctcttttgtttagtatggaataaatggttttctttttctatacaatgaatttctaatttagtatctatacaattatggataaaatttaacctacacgaccaagacgaacatcatctatgcccgtgatgggtaaggtgattgaacaataatatgccatagtaataatggcaattaaaactataataaagattatatctttatatgagaaaggtacgttgtaatagtaagtacgaggaccatctctaaatcctttcgactccatcgcaactgataattgatgtgcctttctaatattttggcttaatagaggtataattaaatgcttaaatcgctttaaccctctataatttgccgcgtctatcatctgatagcgcatttttaaagatctgcgaagctgtattaaagaactaatcattaaaggtatcatacgaatggcagccatgaatgcataagcaacttttgatttaacctttaaatgttgcattaaactataaaatatcatgacaacctgagatgtaagtgcgattaagataccgaaaaatgaaatagcaatggttcttaatgatacatgtaaaccacgaactaaactttctgttgtaatatggataaatccgaatttcaaaattgtatggctaccattcccgtataaaatcatgaacagggaagagagtaatgcaaagccaatacttatagttataaaaattgctgtaattttaaactgagtaccattaaacatcaataagaaaactaacattaagatagtgatataaagcataaaatcgaaattatgcacaaatataataaagaaaaatagtataattccaagaaatagtttcgttataatgttgacatcatcaacaaatgattgccgaactttccattgctcatacattcgtatcaccatcacaatctagtaacgcaccatctgaaattttaagtcttcttgatggataacgttcaattatttcatcgtcatgtgtaaccatgacaatactttgtcccaaattaattcgcttttggaaaagtttgatcaactggaatgtattatggctatcaagtccaaatgtcggttcatctaaaaagataatatcagctttagaacttagtgcggtagctacgctaaggcgtcgtttttgaccaatagacaactcataaggatgttgatcttttacattttgtaaatctaaaagttttaaaagttgtatcgtttcatcatcactttgatctttagaaaggtgattaaaatgaatgttaatttcatcataaaccgaatttgttataaattgtaattctgggttttgataaactaggtacatgtgttttgctgcatgtttaatttttgttaaacgctgattttcaaaataaacatcaccttgatatttaatcaattgcataattgattcaagcaaggttgttttaccactaccatttgcccctgtaattgtaatccactcacctagaccaatttctaaatctgagaatgagagcaatgttgatttaccgcgaataatacgtccatttttaaattgtaataagtgtgagtttgttgttggaaagtcaacacgacttggtgcgaattcccatgcacgtggatgccacacaccatattcactgagtaaatgaacatacttctgtaatatgatttcaggacattcatcggcaatgatatttccgttataatccatcaaaatgacgcggtcgacatgattccagatgtgtttaactttatgttcaacgattacaaccgtttgatcttcccaaagttcaattagtttagtccataaatcttctgttgcttgaacatctaacattgctgtcggttcatctaaaaacaatgtttttgattgttgaagaatggtttcaacaattgccaatttctgtttcatcccgccacttaaatctttgatatacgtttcaggggtaacatttaaattgaccatatttaaagcattgataattaacgcatccatgtcttcacgtggtaattgtctattttctaaaacgaatgcaagttcttcgtatacttttggcatacaaaactggctatcagggtcttggaaaataacgccacttaatgggtcaacgattagttcatcatatttcataggtaattcaattaaattaggaacaataccacttaatacattcagaagtgtacttttaccgcaaccagaaggaccgagtaaaagtactttttctttgtcttgaatagtgatatttaaatgatcgaaaattttacgttgaccacttggatattttaatcgtaaatcacttacttttaacactctgaatgctcctcttataagttgtcgtaatcttctttagcagctggtctaaataattttgttacgcctgtcttatctaaagcttttactaaaaggtaagataggacgccggcgactactgcaccactaattaatctaaatacgatgaataatgttaagttccaacctgcaacttcatttaaataaccatagaaataatctatcgggaaagccgcgattgctgtacaaaaacctgctaacatagctaccataactgaacgtgattgatatttaaaaattgcaaagacaagttcacacgctaaaccttgtataaaagcgtaaacgattgtcggaatatcgaaacgacccataatgatagtttcgccggcacctgcagcaaattcagccagtaaagcaatacctggttttggaataattagatagcagacaatcgctgccatgaaccaaaccccgtttgttaattgttcgaggtgaaggcctgtagcttgcacaccattgtaaacaaaccaccataaattgtaaataactgcgaatactactgaaataagtacggttactagtatttcagatagctttaaaccttttgacatttttacatcctcctaataaaaaaacgcacaaccatccataggaaagttatgcgttcacaatatatattagtaaaacatatgtatagtaacactttcctacgctagttcaagctagatcaggttcaaagggtttgagggcaagcctcatctcagtataaaacacccctagtgtgtgcgatttatttaattaattatactgtaagacgtttgtaaacttatgtcaataggttgtcttcatgaaatttcgtttaattcgatttaaaatttataatattagcattggatttaaattgaagatgtagtaggaatgttagtaattaaagatataaaaatatgtgacatgtaataatattgagctgataaatgaagagggatacttatcaatcatacctctttaacaacagtgaagaacccgtgcataatggcttacgaattatagtttataaggaagaagagggatacatgcgccgagcacatgcataaaagcccctaacaactaaaagttgtaaggaaggagagggatacatgcgccgagcacatgcataaaatcccctaacaactaaaagttgtaaggggatttaaattaatttagtgtatcttggatatcttgttttgtttgattaatatcttctgttttttcttcttttttatcttttaatttttcttcaacttctttagctttttctgctgcttttttattttgattttcattagacatgattaattcctcccaaattggataattatttatatataaatcttacccggttgtactttcgttaaacttttctaagtctatagcactatttattcatttatctaaagacaacaacattagattaatatataatgattttgaggtgaacataatgtcttttcttaggaaacacgccgaaattatttttagctatttaatcggtatcgtttcactcttcactggtctcattattttaattaacttgccattaattaaacaattaaatggtggtaaaaaagttgatacacatgttcataatgtgtgggaatttctgaatgcatttttcagtgaaattattaaagtaatgagtcgatttataggtaatttccctatagttagtgcaattgtgataattatattcggtattttagttatgttgattggtcatacattacttagaactattaagtatgactatgatatttctatctttttcttagttatcggtatcatgtactttattattactcttatattaatgactcaagtttatggattctttgcagtgattttcattattccatttacaattcatataggatatatcgtctataaagatgaattgaatcaggaaaatgtaaaaaatcatttcatgtggataattgtgagttatggtataagttacttaattacacaaattgcattgtatggcagaattgatgctaatgaaatagagtcaattgatatcttaagtgtcaatgctttctttataattatgtggttacttggtcaaatggctatttggaatttcttgttcttgcgccgagctttacctttaacaaagcaagaattaggtgaagaggagccagaattatcaagaacaagtaaagggaatgtcacgaatcaaactaaaattcacttgaaacaactccaagataagactacagaatatgcacgtaagacaagaagaagtgtcgatttagataaaattagagctaaaagagataaattcaaaaagaaagttaatgatattatcgatattcaagaagacgatattcctgattggatgagaaaaccgaaatgggttaaaccaatgtatgtcgaactattttgtggtgtcgtcatctttttattcacatttttagaatttaataatcgtaatgcattatttgtatctggtgattggaaattatcacagacacaatatgttattgaatgggttacattattaattctgttattcattattatcgcatatatcgctacaacgttaactttccacttgaaaggtaagttttattatttacaattatttatggggagcattttattctttaaattgttaacggaatttataaatataatgattcatggactattactttcagtgttcattacgccaacattactattaatgttattggcaatcatcatttcttattcgttacaattacgagagcgaccataattaaaagcattataaaagtactatctattaaacattttgatgtgtacgctataagttagatatatctctaacttacttagatacaggtcaatgaagtttatggatagtactttttttgtaactagatttgattgattcaggtgatgtgaattaagtattgaaaattgtatacaaagttttagtgcaaataaaatagttgaaaagttatccatttgtaaaatcaagaaaactagtaaatagttgaagcgacttatggaatttgcgaaacgatatatagtatttcctttgtagaaatttaacatatatcattcaaattactaatttgttaaaatcaacagtaagattagaagtagatgatattgaaatttggcaaacaatttaatctatataaaactacaacgaaacacagaaaggaagttgtcagatgaaaatagcaactctgaacaaaggcaaagaaacaaaatattttaatggatatcctttaattgaagaagaggatatctattcacaagatcatttaaaagaaggagatatttttcaaattgtgactgataaatcacaatatgtcgcaacggcttatgttggtcgccaacataaaggattaggttgggttctaacatacgataaagctcaacaaatcaacacagctttctttgtaaaattgtttaatactgcattagcagaacgtgattattattttaatatagatggaacaaatgcttttagattatttaatgctgaaggtgatggtgttgggggattaacaatcgacaattacgatggtcatttgttgattcaatggtactcaaaaggtatttataaatttaaatatgccattcttgaagcggttagaaaagtatttgattataaatctatttacgaaaaagtaagatttaaagacagcgaatatagtggtggttttgttgaaggagatgcacctgagtttccaattgttatcgaagaaaacttcacattttataatgtagaccttgaagatggtttgatgacaggtatctttttagatcaaaaagaagtgcgcaagaaattaagggatcaatatgccaaagaacgccatgttttaaacttatttagttatacaggtgctttttctgcaatagcagcaagtgaggcatcttcaacaacaagtgtagatttggctaatcgttctcgtagtttaactgaagaaaattttggattaaatgctattgatcctaaatcccaatatatttatgtcatggacacttttgatttctataaatatgctgcacgacatggacatagttatgacacgatcgtgattgatccacctagctttgcgcgtaacaaaaaacgtacattttcagtgcaaaaagattatgacaaattaattaatggcgccttaaatatcttatcatctgaaggaacattattgttatgtacaaacgcaagtgtatatccattaaagcaatttaaaaatactattaaaaagacgcttgaagagagtggcgttgattatgaattaactgaagttatgggattaccaaaagattttaaaacgcatccacattataagccatctaaatatttaaaagctgtttttgtaaatattagacattaatttgataaaaaggggtatagtaacttattgagaaaaagaagggtgataatattatgggattcaaaaacaatttaacatcaaatttaacaaataaaatcggtaattcagtctttaaaatagaaaatgttgacggaaaaggtgcaatgccaacgacgattcaagaattgagagaaagacgacaacgtgctgaagcaattgtaaagagaaagtctttaatgtcatcaacaatgagcgttgttccaattccgggtttagattttggtgttgatttaaaattaatgaaagatattatcgaagatgttaataaaatttatggtttagatcataagcaagttaatagccttggggatgatgtgaaagaaagaattatgtctgcagcagcaattcaaggtagtcaatttattggtaaaagaatttcaaatgcatttttaaaaattgtaattagagatgtagctaaacgtactgctgcaaaacaaacaaaatggtttcctgttgtaggacaagctgtgtctgcatctattagttactattttatgaataaaattggaaaagatcacattcaaaaatgcgaaaatgttattaaaaatgtcatgtaggtgctataatagttttgcaatttgcaaattttactgaaaccggttttaaacgaattgaatttaaagcatggttttggtaaagttaatgtataaaactaagttagtattgtaataatattgaagattctaactatacgaaggagaaatgtaattatggaacaaaattcatatgtaatcatcgacgagactggtattcacgctagaccagcaacaatgttagtacaaacagcttcaaaattcgattctgatattcaattagaatataacggtaagaaagtaaacttaaaatcaatcatgggtgttatgagccttggtgttggtaaagatgctgaaattacaatttatgctgacggtagtgatgaatctgacgccattcaagcaatcagtgacgtcttatcaaaagaaggattgactaaataatcatgtctaaattaattaaaggtattgccgcatctgatggtgtcgcaattgctaaagcttatttattagttgagccagacttaacattcgacaaaaatgaaaaagtcactgatgttgaaggagaagttgcaaagttcaatagcgctatcgaagcttctaaagttgagttaactaaaattagaaataatgcagaggttcaactaggtgctgataaagctgctatctttgatgcacatttattagttttagatgaccctgaattaattcaaccaatccaagataagattaaaaatgaaaacgctaatgctgctacagcattaacggatgtaacaacacaatttgttacaatttttgaatctatggataacgaatacatgaaagaacgtgcggctgatattcgcgacgtttctaaacgtgtgttatcacatattttaggtgtagaattaccgaatccgagtatgattgatgaaagcgttgttattgtagggaatgacttaacgccatctgatactgctcaattaaataaagaattcgtacaaggttttgctacaaacattggcggaagaacaagtcactctgcaattatgagtcgttctttagaaattccagcaattgttggtacaaaatcaattactcaagaagttaaacaaggcgacatgattatcgtagatggattaaatggtgatgtaatcgttaatccaactgaagatgagttaatcgcttatcaagataaacgtgagcgttattttgctgacaagaaagaattacaaaaactacgtgatgctgatactgttacagttgatggtgttcacgcagagcttgctgcaaatattggtacacctaatgatttgccaggtgttattgaaaatggtgcacaaggtatcggcttatatagaactgagtttttatatatgggtcgtgaccaaatgcctacagaagaagaacaatttgaagcttataaagaagtattagaagcaatgggcggtaaacgtgttgttgtacgtactttagatataggtggagataaagaattatcatacttaaacttgcctgaagaaatgaatccattcttaggttaccgtgcgattcgtttatgccttgcgcaacaagatattttcagaccacagctacgtgcattattacgtgcatcagtttatggtaagttaaatatcatgttcccaatggttgcaacaattaacgaatttagagaagctaaagctatattattagaagaaaaagaaaaccttaaaaatgaaggtcatgacatttcggatgatatagaattaggaatcatggtagagatacctgcaacagcagcattagctgatgtctttgctaaagaagtagatttcttcagtatcggtacaaatgatttaattcaatacacattagctgctgaccgtatgtcagagcgtgtatcatatctataccaaccatataacccttcaatcttacgtttagttaaacaagttattgaagcgtcacataaagaaggtaaatggacaggtatgtgtggtgaaatggctggagatgaaacagctattccattattgcttggtttaggtttagatgagttctctatgagtgcaacgtctattctgaaagcaagaagacaaattaatggtttaagtaaaaatgaaatgactgaacttgctaaccgtgcagtcgactgtgcaacgcaagaagaagttattgaattagttaacaactacgtaaaataattaattctttcgaaagacagaattataaataaacccgaagtattcattgtaagtaattatgaatacttcgggttcttttttatgatttatgttaatttcaatggaatgttgttgctaactaattaaacaactatgtgtcattaacaaaatgtagttctttaattaatgttagttaatttaaaaatcgatatttaatttatgatagctataaatgatgaagttgatttagatgaaaattaatcttggatatttaatactttgttgatttcatcaagatcaacatggtacattggattgccattcaacaaaataaacggagttgaaaaagcatcaaaatctatcatttcgtttcgatattgttgattgttgatatttctctcttcaaaatcaatgtgatgctcatttagataattttttacaaatgtacaaggtggacaatcattctgcgtataaacgattatttctgacatgtatcatgctccttcgtgctttattctaatgtaatatacacaattatacattgaaattcaaatttgtgaacacattgtgaactgacataaattatacacaatttcatagcgcataatgttttaaaaatacacattatagcaattataattaagttcattgtgttgtcatcaaaaaaagaaaaaggtgatgtttttaaatggatacagttgaaatcagtcggtttttgacagctatgactttagcagttcatatcatttttgcaacgattggtgttggtatgcctttaatgttcgcaattgcagaatttttaggtattcgcaaaaatgatcttcaatatatagctatggccaaaagatgggctaaagcttatacaattactgtagcagtgggagttgttacaggtacaattataggacttcaattatcattgatttggcctacatttatggaaatgggtggacacgttattgcacttccattatttatggaaacatttgcgttcttctttgaagctattttcttaagtatatatttatatacttgggatcgttttaaaaataaatggacacatttcttaattagtataccagtaattattggtggctctttctcagcattcttcattacttcagtgaattcatttatgaatacgcctgcaggttttgagttgaagaatggaaagatggtcaatgttcaacctatagaagcgatgtttaacccatcgtttatagttcgatcatttcacgtaattactacagccggtatgacgatggcatttgttattgcatcaatagcagcttttaaattattgcgtaatcgtcaacctaaagatactgtctaccataagaaagctttgaaaatgtctatgatagttggattcttttcaacattactttctatgttggcaggggatttatctgcaaaatttttgcataaattccaacctgaaaaattagcagcttatgaatggcatttcgatacatcttcccatgccaaattattattatttggtgtgttagatgaaaagactcagcaagttaaaggtgcgattgaattacctggactattgagtttcttagcagataatagtgtcaaaactaaagtacaagggttaaatgattttccaaaaagtttacatccgcctatgatcgtccattatttctttgatttaatggtaacgatgggaattttatgttttgtcatttcaggtgtttatgtcttaactttaatgtttaaaaagcttagaaagttttctactcataaatggatgctttatggaatattattaacaggcccagcttcaatgctagctatagaatttggatggttcttaacagagatgggtagacagccttggattgttcgtggttatatgcgcgtggcagaagcagcaacacaagcaggcggaataaccttcgttacaattttatttggcatattgtacatcattttaatgtatacatgtgcatacgtattaattcgtatgtttaaaaataaaccggcgtatgaagatgtaaatcgtttagccaagaagcaaggaggagaaatagaaaaatgatttatgcatttataggtataacagtgttatggttgtttttattttgctatatcattattgcttctatagattttggggcaggtttcttcgcattgcattcaaagttaactggtgatgaaaagaaaattaatcacttaatttcacgttatttaaacccagtttgggaagttacgaatgtattctttgttttcttcttcgtaggattcgtaggtttctttccagagtcaatcaaatatttaggcacggtattgttaataccaggttcaatagcactgattatgatatcgttgagaaacagtttttatgcatttgaaaattatggtcaagatacaaaattagcatggatgatcatgtatggggtaagtggattattaattccagcttcattatctactgctttaactattacagaaggtggctatattaatgttcgaaacaatgttatcgatctagattgggtgcagttattattaagcccatttgcttggtctgtagtattcttggcaattatttcagttttatatatttcatcaggatttttgacatattatgctaaaaaagcaaatgacgaaccagcatataatttaacaagacaatggcacatatttttagggccgccgatgattatcatttgtttattcgtatttctatcattacgcattcaaaattctgaacatttttattcagctgtttttgactattggtggatgtttggtataagtttcttattctttgcattagcttcattgttaacattctttaagaaaaaacatggtttggcttttgtatttgttattttacaaatgatgttcgcgttctttggctatggaattagtaaattgccataccttttatatccgtttgtaaaaattacagatgcatatgttaatccagaaatgggctggacattagtgattgtctttattttaggtttacttttattacttccatcgttaatattattattaagattatttgttttcgacaaagaatatgttgaaggaaagaaatcataagttgagacgataccccaactttcatttacttgcattactgcatttagataatttagttggggtactcatttataataattttaaatttatattttcaatgaattgatgaaaatcatttaatggagggcgagtatgggtaaagaatatgtagtcatcggtctaggtcgttttggaggtagtatcgttcgtgagttgaatgcattagacatggatgtaatggccatcgaccatgatgaaaatagagtgaatgaatatagtgatatcgctactcatgcggttgttgcagacactacagatgaagcagttatgaaaagtttaggtatccgtaactttgatcatgtcattgtggcaattggtgaaaatattcaatcaagtacgttgacgactttaattttaaaagagttaggtgtaaaaaaagtaactgctaaagcacaaaatgattatcatgcaaagattttaaataaaattggagcagatacggttgtgcaccctgagcgtgatatgggtagacgtattgcgcataatgttgcgagtgcaagtgtacttgattatcttgagttggcagacgagcattctattgtagaattgaaagcaactgaaaagatggcggggcagtctatcattgatttagatataagagcacaatatggaattaacattattgcaattaaacgaggcaaagagttcatcatttcaccaaatccaaatattaatttagaaataggtgatattttaatcatgattggacatgataatgatttaaatcgctttgaaaaaaatattgcgacgagataatcgggagtgggacagaaatgatattttctcaaaatttatttcgtcgtcccaccccaacttacattgtctgtagaaattgggaatccaatttctctttgttggggcccacaccccaactcgcattgcctgtagaatttcttttcgaaattctctatgttggggcccctgactagaattgaaaaaagcttgttacaagcgcattttcgttcagtcaactactgccaatataactttgtagagcattgaacattgatttatgtctcaagctcatcatatataaagaaaaagctactaacaatgggtggtgagtttaattaaaacttcacttcaaagttagtagctttttgattatttattgtttgattctttttgttcgtttaccttcataatgactggtaaaatcattggttttctagctgttttttcaaataaataaggttgtaatgtttcaatgatagaagatttaatctgatgccattgaatatctttattttgatttaacttactaataacatcagttttgattttgcgttgtgcatcataaattaattgacctgattccctcatatatacaaatcctcgagaaataatgtctggaccagaaagtaatttatttgtattaaaatcaatactaacaacaacgataactaaaccttcttcagataatagcttacggtctcttattacaacattaccgatatcaccgataccactaccatcaacaagtacattaccagatggaatgcgaccagctttacgtgctgaatcgtgtgttaaagctaagacatctccaatatcaaagatgaagacattatcttcttcaacgccgcattcaacaccagtctcaccatgtgcttttaacatacggtattcaccatgaataggtaagaaatatttcggcttgattaatcgaagcattaattgttgatcaccttgagaaccatgccctgaagtatggatgttagaaatcttgctatggataacatctgcaccagctttatacaaggaattaatagttctgttaatactttttgtattacctgggataggtgatgaactaaatacaacggtatcttcaggtataattttaatttgcttatgagtaccattagcaattctagataatgctgccattggttcaccttgtgaaccagtacatagtatcaataactcatgcttcggtacggtattaattttattaggttcaataaatgtttcaggtggtgctttaatataaccaagttccatacctattttaatattgttttccatcgaacgaccgaacgtaacaattttacggttatttttgatagcagcttcaactgcttgttgaactcggtaaatattagaagcgaaggtagcaaatataatacgacctttacaattacggaagatcttatctacgttttgaccaacttcacgttcgcttaaagtaaaatcaggcacaagtgaatttgttgagtctgaaagtaaacatagaacgccttcttcgcctaattgagccattttagcaatgtttgctggtttgcctacaggtgtaaaatcaaatttaaagtcaccggtatgaactacttttccttcaggtgtatctacgatgacgccataagtttcaggaatactatgtgtagttaagtagaaagaaatcgtaaagtgcttagatttaatcacactgtcctcattgatttcatttagtttagcagtacgtaataaatgatgttcttcaagtttattacggattaaacctaatgctaaaggaccaccataaataggtatattaagttgttttaataggaagggcacaccgcctatatggtcttcgtgaccatgtgttataaataggccaacaattttatcttggttttgaactagatatgtgtagtcaggtataacataatcaatccctaataagttatcatcagggaatttgatacctgcatcgataatgacaatttcgtctttatactcaactgcataagtatttttaccgatttcacctagacctccaagtgcatatacacctacttcatttggatgtaattgtttcattatttagcaatctccacattaaagtgttctgagttttctttttcgtaatctaaatgtgcgccctctaatttagtgataaattcgatattaaaattacgatctttcaagtaacgacgtacttgttcttctgtttgagcttcaacataaagtgattgtgtattttcacgcacaattacctcgtctctgttatgttgataaaaaactttaaatactgccatgttaaaaattcctcctaagaatgtttgtttaatttattgttaaccctagtaaaatcgtattggagtatatatcgataaattcattccaatcatctctataatgtaacttaataacgatttggttaataactaggttcatcatgtcgttcattttaaaaaattagtgaaataacactaaaatttcagttaaatcttattttacatgatgaatgataataaataaagcagtttatctcactagaaatctaagtatttcgaataaatgtgcagttctatttattaaaataaatgtagagattataaattaatgttaagaaagaattaaaggattttatatgaaacggtaaaatttaaatgaggggataaaaagtttggtagaaaggtgaatatatttaactgttgtttattcgaaaaagttgtaaaaggaaaagcttaggacatcatatttatcctaagctttgataattagaaaaatgtgttttaaacttctactgcatctgtatgtggttgtaatgggtgatctttgtcaatgtgatcatagaacattacaccatttaaatggtcaatttcatgttggaaaacaattgctggatatccttttagtcgtaattgtatatcattaccttcgatgtctttggctttaattgtaattctattatgacggtgaactagaccagcaacattatcatcgacactaaggcaaccttcaccagttggtaaataagcttcttgaacgctatgacttacaatttttgggttcacaagcatatagtcataagatttgccactgccatcatctggtattaaaacagcaatcatacgtttagaaatattaatttgaggtgcagccaaaccaacgcctgaacgtaaaccatatcgtttcgcgatttcctcatcttgactatttactaaaaactctctcatggcgattaatgtttctttttcttctttagttaatggtaattctaactcagctgctttttgacgcaaagttggatgaccatctctaatgatgtctttcattgttaacatatattgcaccttccttattttaatttgttttagttgaatgacagtaaaaaggttgttaagatactcatacatttttatgtgtaaatatctacaaagttaaccaactactgccaatgtttattttagatagtatatgtaaattttcagatatgctaattgcttaaaaaatgattaaagtgttggtttcaagcaatgatactttagaaatttatttatcatcttgactttaaaaattatattataaatgacgtaactgtcaacagatatacttagtaatgaagatgtgtaatgtaattgtttaaaattgatttccaagcagattttatttatcatttaatttaaatagcaagtggaggtacaagtaatgaaatttggaaaaacaatcgcagtagtattagcatctagtgtcttgcttgcaggatgtactacggataaaaaagaaattaaggcatatttaaagcaagtggataaaattaaagatgatgaagaaccaattaaaactgttggtaagaaaattgctgaattagatgagaaaaagaaaaaattaactgaagatgtcaatagtaaagatacagcagttcgcggtaaagcagtaaaggatttaattaaaaatgccgatgatcgtctaaaggaatttgaaaaagaagaagacgcaattaagaagtctgaacaagactttaagaaagcaaaaagtcacgttgataacattgataatgatgttaaacgtaaagaagtaaaacaattagatgatgtattaaaagaaaaatataagttacacagtgattacgcgaaagcatataaaaaggctgtaaactcagagaaaacattatttaaatatttaaatcaaaatgacgcgacacaacaaggtgttaacgaaaaatcaaaagcaatagaacagaactataaaaagttaaaagaagtatcagataagtatacaaaagtactaaataaggttggtaaagaaaagcaagacgttgatcaatttaaataattaatataatacagatggtaggaaacaactaatacagttcctattatctgtatctttttttattaaaacagaactttttcaaatggtttaacagtcccatttatttgtggtacaattagtaaggataaaatgaatttctatacaattatgggaaaggtatggtgaattgaatggctcctaagttacaagcccaattcgatgcagtaaaagttttaaatgatactcaatcgaaatttgaaatggttcaaattttggatgagaatggtaacgtcgtaaatgaagacttagtacctgatcttacggatgaacaattagtggaattaatggaaagaatggtatggactcgtatccttgatcaacgttctatctcattaaacagacaaggacgtttaggtttctatgcaccaactgctggtcaagaagcatcacaattagcgtcacaatacgctttagaaaaagaagattacattttaccgggatacagagatgttcctcaaattatttggcatggtttaccattaactgaagctttcttattctcaagaggtcacttcaaaggaaatcaattccctgaaggcgttaatgcattaagcccacaaattattatcggtgcacaatacattcaagctgctggtgttgcatttgcacttaaaaaacgtggtaaaaatgcagttgcaatcacttacactggtgacggtggttcttcacaaggtgatttctacgaaggtattaactttgcagcagcttataaagcacctgcaattttcgttattcaaaacaataactatgcaatttcaacaccaagaagcaagcaaactgctgctgaaacattagctcaaaaagcaattgctgtaggtattcctggtatccaagttgatggtatggatgcgttagctgtatatcaagcaactaaagaagcacgtgaccgcgcagttgcaggtgaaggtccaacattaattgaaactatgacatatcgttatggtcctcatacaatggctggtgacgatccaactcgttacagaacttcagacgaagatgctgaatgggagaaaaaagacccattagtacgtttccgtaaattccttgaaaacaaaggtttatggaatgaagacaaagaaaatgaagttattgaacgtgcaaaagctgatattaaagcagcaattaaagaggctgataacactgaaaaacaaactgttacttctctaatggaaattatgtatgaagatatgcctcaaaacttagcagaacaatatgaaatttacaaagagaaggagtcgaagtaagccatggcacaaatgacaatggttcaagcgattaatgatgcgcttaaaactgaacttaaaaatgaccaagatgttttaatttttggtgaagacgttggtgttaacggcggtgttttccgtgttactgaaggactacaaaaagaatttggtgaagatagagtattcgatacacctttagctgaatcaggtattggtggtttagcgatgggtcttgcagttgaaggattccgtccggttatggaagtacaattcttaggtttcgtattcgaagtatttgatgcgattgctggacaaattgcacgtactcgtttccgttcaggcggtactaaaactgcacctgtaacaattcgtagcccatttggtggtggcgtacacacaccagaattacacgcagataacttagaaggtattttagctcaatctccaggtctaaaggttgttattccttcaggcccatacgatgcgaaaggtttattaatttcttctattagaagtaatgacccagtcgtatacttagagcatatgaaattgtatcgttcattccgtgaagaagtacctgaagaagaatatacaattgacattggtaaggctaatgtgaaaaaagaaggtaatgacatttcaatcatcacatacggtgcaatggttcaagaatcaatgaaagctgcagaagaacttgaaaaagatggttattctgttgaagtaattgacttacgtactgttcaaccaatcgatgttgacacaattgtagcttcagttgaaaaaactggtcgtgcagttgtagttcaagaagcacaacgtcaagctggtgttggtgcagcagttgtagctgaattaagtgaacgtgcaatcctttcattagaagcacctattggaagagttgcagcagcagatacaatttatccattcactcaagctgaaaatgtttggttaccaaacaaaaatgacatcatcgaaaaagcaaaagaaactttagaattttaatacattttaaaagttaacgaagttagcgtattttagtctcattgattaaaatgaaatgtttaatttacgaaatcttaggagggcaaaaacgtggcatttgaatttagattacccgatatcggggaaggtatccacgaaggtgaaattgtaaaatggtttgttaaagctggagatactattgaagaagacgatgttttagctgaggtacaaaacgataaatcagtagtagaaatcccatcaccagcatctggtactgtagaagaagttatggtagaagaaggtacagtagctgtagttggtgacgttattgttaaaatcgatgcacctgatgcagaagatatgcaatttaaaggtcatgatgatgattcatcatctaaagaagaacctgcgaaagaggaagcgccagcagagcaagcacctgtagctactcaaactgaagaagtagatgaaaacagaactgttaaagcaatgccttcagtacgtaaatacgcacgtgaaaaaggtgttaacattaaagcagtttctggatctggtaaaaatggtcgtattacaaaagaagatgtagatgcatacttaaatggtggtgcaccaacagcttcaaatgaatcagctgcttcagctacaagtgaagaagttgctgaaactcctgcagcacctgcagcagtaacattagaaggcgacttcccagaaacaactgaaaaaatccctgctatgcgtagagcaattgcgaaagcaatggttaactctaagcatactgcacctcatgtaacattaatggatgaaattgatgttcaagcattatgggatcaccgtaagaaatttaaagaaatcgcagctgaacaaggtactaagttaacattcttaccttatgttgttaaagcacttgtttctgcattgaaaaaatacccagcacttaacacttcattcaatgaagaagctggtgaaatcgttcataaacattactggaatatcggtattgcagcagacactgatagaggattattagtacctgttgttaaacatgctgatcgtaagtctattttccaaatttcagatgaaattaatgaattagctgttaaagcacgtgatggtaaattaacagccgatgaaatgaaaggtgctacatgcacaatcagtaatatcggttcagctggtggacaatggttcactccagttatcaatcacccagaagtagcaatcttaggaattggccgtattgctcaaaaacctatcgttaaagatggagaaattgttgcagcaccagtattagcattatcattaagctttgaccacagacaaattgatggtgcaactggccaaaatgcaatgaatcacattaaacgtttattaaataatccagaattattattaatggaggggtaaaacatggtagttggagatttcccaattgaaacagatactatagtaatcggagcaggtcctggtggatacgttgcagcaattcgtgcagctcaattaggacaaaaagtaacaatcgttgagaaaggtaatcttggtggtgtttgcttaaacgtaggatgtattccttcaaaagcattactacatgcttctcaccgttttgttgaagcacaacattctgaaaacttaggtgttattgctgaaagtgtttctttaaacttccaaaaagttcaagaattcaaatcatcagttgttaataaattaactggtggtgttgaaagcttacttaaaggtaacaaagttaacatcgttaaaggtgaagcatatttcgtagataacaatagcttacgtgttatggacgaaaagagcgcacaaacatacaactttaaaaatgcaatcattgcaacaggttcaagaccaattgaaattcctaatttcaaattcggtaaacgtgttatcgactcaacaggtgctttaaacttacaagaagtaccaggtaaattagttgtagttggtggaggatacattggatcagaattaggtacagcatttgctaactttggttcagaagtaaccatccttgaaggtactaaagatatcttaggtggcttcgaaaaacaaatgacacaacctgttaaaaaaggtatgaaagaaaaaggtgttgaaatcgttactgaagctatggctaaatcagctgaagaaacagataacggagttaaagttacttatgaagctaaaggcgaagagaaaacaatcgaagctgattatgtattagtaactgtaggtcgtcgtccaaacacagacgaattaggcctagaagaattaggtgttaaattcgctgaccgtggattattagaagttgataaacaaagccgtacgtctatcagcaatatctatgcaattggtgatatcgttccaggtttaccacttgctcacaaagctagctatgaagctaaagttgctgctgaagcaattgatggtcaagctgctgaagttgattacattggtatgccagcagtatgctttactgaaccagaattagctacagttggttattcagaagcgcaagctaaagaagaaggtttagcaattaaagcttctaaattcccatatgcagcaaatggtcgtgcattatcattagatgatactaacggatttgttaaacttattacacttaaagaagatgatactttaatcggtgctcaagtagttggtactggtgcatcagatattatctctgaattaggtttagcaattgaagctggtatgaatgctgaagatatcgcattaacaatccatgcacatccaacattaggtgagatgactatggaagcagcagaaaaagctatcggatacccaatccatacaatgtaataactgattatctataaagattcagtcattaaaagctgtagcatatgctacggcttttttgttttaggtaaagtaatgtaaggaaattgatttgagatatcgttaacatgtgacatgcatgttatactagcgatgctaataaaagaattgaaatggagggttcaacaatggaatatgagtatccaattgatttagactggagtaatgaagagatgatttcagtgataaatttctttaatcatgtagagaagtattatgaatccggcgtgacggcaggcgactttatgggtgcatataaaagatttaaagaaattgtgcctgctaaagcagaggaaaaacaaatttttaatactttcgaaaaaagtagtggctataatagttacaaagcagttcaagatgtaaaaactcactctgaagaacaaagagtaacagctaaaaaataattcgttcgaaattaacacaatttaataggaatttttctttaaaactattgctaataaagctatattttgatacctttatcaagtgttaaacaaaatgtttgataaaagtaaacttaatatagcttttttaggtggaaaaataaatgaacataggtaataaaattaaaaatcttagaagaattaaaaatttaacgcaagaagaacttgctgaacgtacagacttatcgaaaggctacatttcacaaatagaaagtgaacatgcctcaccaagtatggaaactttcttaaatattatagaggtgttaggaacgacgccaagtgaattttttaaagacagtgaaaatgaaaaagtattatacaagaaggaagaacaagttatttatgatgagtatgatgaaggttatatattaaattggttagtttcaaagtcaaatgaatatgatatggagccattaatattaactttaaagcctggagcatcatataaaaattttaatccatcagagtctgatacgtttatttattgtatgtcaggtcagataacacttaatttaggcaaagagatatatcaagcacaagaagaagacgttttgtattttaaagcacgagataatcatcgtttgtcaaacgaatcaaacaatgaaacacgaatacttattgtagcgacagcttcatatttataggggggatcttatttggaaccgttattatcattaaaatcagttagtaaaagctatgatgatcttaatatcttagatgacatagatattgatattgaatcaggatacttttatacattattaggtccttcaggttgtggtaaaacaacaattttaaaattaattgcagggtttgaatatcctgacagtggtgaagtgatttatcaaaacaaaccaattggtaatttaccaccaaataaacgtaaagtgaatacagtctttcaagattatgcattatttccacacttaaacgtctatgataatatcgcttttggtttgaaattaaaaaaattatcaaaaaccgaaattgatcaaaaagtaactgaggcattaaaattagtaaaactttcaggttatgaaaaaagaaatattaatgaaatgagtggcggacaaaagcaacgtgttgcaattgcacgtgctatcgtaaatgaaccagaaatattattgttagatgaatctttatccgcattagatttgaaattgcgtactgaaatgcaatatgaattacgagaattgcaatctagattaggtattacatttatatttgtaacacatgatcaagaagaagcgttagcattaagtgactttctttttgtattaaaagatgggaaaattcaacaatttggcacaccaacagatatatatgacgaaccagtgaatcgatttgtagctgattttattggagaatctaatattgttgaagggcgcatggttagagattatgtcgtgaatatttatgggcaagatttcgaatgtgtcgatatgggtattcctgaaaataaaaaagtagaagtcgttattcgaccagaagatatatcattaatcaaagctgaagaaggattatttaaagcaactgttgattctatgttatttagaggggtccactatgaaatatgttgtatagacaataaaggttatgaatgggtaatacaaacgactaaaaaagctgaagtaggcagtgaagttggtctttattttgatcctgaagccattcatattatggttcctggagaaacagaagaagaatttgataaacgtattgaaagctatgaggaagtagacaatgcgtaatactaataaatttctcttaatcccgtatttactatggatggttatatttattattgtaccagttgtattactcatttatttttcatttttagatatcaatggacattttagtttcacgaattatcaacaaatttttactacaaaatatttgaaaatgtttgcatattcaattttatatgccgcttcaataacaattattaccttgactatcagttatccagctgcctattatattactcgttcgaaatttcaaaatatcttattaatgataatgattattccaacatggataaatttattgttaaagacatatgcttttataggtttattaagtcatgatggcgtgattaatcaatttttccacttatttaatttaccatcattcaatttgttatttacaactggtgcgtttttagtagtggcaagttacatttatataccatttatgattttacctatatttaatagcatgaaagcaattcctaataatttattgcaggcctcaagtgatttaggtgccagtcctttctatacttttagaaaagtaatcatgccgttaacaaaagaaggtgttatgactgggattcaagtaacctttattccatcactttcattatttatgattacaagattaattgcaggtaataaagtcataaatataggtacggcaatagaggaacaatttttaacaattcaaaattatggtatgggatcaactatagctatattcttaattgtatttatggcattcattttaatcattacaaaatcatctaatgggagagggtgaatcatatgaaatggtatggaaagctgtatatcgggatacttttagcgattttatacatcccaatattctttttaatgttctattcattcaattcggctggtaatatgattcactttgaacattttacattagagcattatcaatcattatttcaaaatgatcatttaatgtcggtcatttttaatacgatagctgtagcacttttagcagcctcaatttctacagttattggtacatttggtgccattgctatttattatttaagaaataaaaagtttaaagtaactttactaacattgaataatgtcttgatggtatcatccgacgttgtcataggtgcatcattcttaattatgtttacaacgattggccattttactggtcttggtttaggattttggacagttctaatatctcatattgcattttgcatacctatagttgtgattatcgtcttaccacaactgtatgaaatgaataataatatgttaaatgctgcaagagatttaggagcgactgaaccacaattattaagcaacattattattcctaatattttaccttctattataggaggattctttatggctttaacttattcactagacgatttcacagtaagtttcttcgttactggtaatggctttagtgtgttatcagttaaagtttatgctatggcgagaaaaggaattagtatggaaattaatgcgatttcaacattattgtttgctgttattgtattaggaatactaggatattatttgattcaatacgtgataaataagaaaaaactaatcaagcgaggtgtaaaataatgaaacgatttttacaactcattataggtgcattagttgtgggtatgctttgtcttactttaagtcattggtttaaatctaaagaacaagtgcatacaaatcaaaaaatttacgtatacaattggggtgaatatattgatccagagttaattaagaaatttgaaaaagaaactggcattcaagtcgtttatgaaactttcgattcaaatgaagcgatggaagccaaaattcgcaatggcggtacacattatgatgttgcttttcctagtgaatatacagttcaaaaattgaaaagagatcatttattgttaccaatagatcataataaggtacctaatattaaaaatttagattcagattatatgaatatgtcatttgatagaggcaataaatattctttaccttatttctttggaactgtaggtattttatataataaagaaaagtatccaaatgaatcatttgatagttggaagtcattgtataatcctaaatttaaaaaccaaattttactagttgacggtgctagagagattataggcatgagtttgaataaacttgggtataatcttaatgaccgtaattcgcaccatttaaaagaagcagagcgagatttaaccaaactagcaccacaagtaagaggtgtcgtaggtgatgaaattaccatgatgcttcaacaaaatgaaggtaacatagcggttgtttggagtggtgttgcagcacctctagtgcaagaaggggataaatataattatgttattcctaaagaaggatcgaatttatggttcgacaatatggtaattccaaaaacggcacaaaataaagagggtgcatataaatttatgaattttttattagatgctaaaaataacaagcaaaatacagaattcgtaggctatgcaacgccaaacaaggctgctcgacaattgttgcctaaagagattaaagacgaccatcgtttttatccgactaagaaagagcaagaacgccttgaagtttataaagatttaggacctgaagttttaagtgaatacaatgaaaactttttgaatttcaaaatgtcattaaaataaaatcataaatagtagttatttactgtatatttagttataataacgggataagtactataaggagttgtaacgaatgactggagaacaatttactcaaattaaacgtccagtaagtagattaactgaaaaagttctaggttggttatgttgggtgatgttattagtgcttactgtcattacgatgtttatagcacttgtttcattcagtaataacacatcgattgctaatcttgaaaatacattaaacaataatgcatttatccagcaattattagctggaaatggctataatacaacacaatttgtaatatggttacaaaatggtatatgggctattatcgtttactttattgtttgtttgttgatttcatttttagctctcatatctatgaatataagaatcttgtcaggtttcttattcttaatatcagcaattgtaacgattcctttagttttacttatcgttactttaatcattccgatattattctttattattgcgatgatgctatttataagaaaagataaagttgaaatggttgcgccacaatattatgaagagtataacggaccgatttatgattatcgtgaacctgtgtatgagcgcccccaaccgaaagatgattattatgatgtgcctaaatatgaaaaagaattggataaatcaaatactgtatatgatcaagaacaggaaagagataaatatgatcaatttcctaaacgtgcagttgaaagtgaatataatcatgatgagcgcactgaggaagaaccatcagtattatccagacaggctaaatacaaacaaaaaagtactgaagaactaggtattgaagatgatggttattatgcagaacctgaagttgatccaaaagaattgaaagcacaacaaaagcgagaaaaagctgaaattaaagctaagaaaaaagaaaaacgtaaagcttataaccaacgaatgaaagaacgtaggaaaaatcaacctagcgcagttagtcaacgtcgaatgaattttgaagagcgacgtcaaatttacaacaatgatatttctgaagaacgcaattcaagtgaagttaaggacaaaaaagagcaagaataaatattgatgatacccagattagtaagcagaggtcttttgcttattaatctgggtttttatatgaggttaattatcgataacgtttaattaaagtgtttaggtgtcataattttaaatgacgatttctcattactatacacctaaattatcatcaatctgaattcagatgtttattataaaaattagatgaaaaatatgttaatatacaagtaatttaatgtgcgtatatctataggctcgtagtatacttattaaaatattaaacaaagaaaggattttaagatgaatagaaaacctgaattaatcatggcttggattgcaaatagtattagtattatttatttattagttatggggctatcctatttttctttaaaaagtggtaatgcatcacaacgtgaagaattagcgaagcaattatctcagaacggtggcaaggtttctttagatatgcttcagacaacaatgggtgcattagcaattattttattaatttcaacactttatggtatatttgcgacaatttgtattaaaggacgtagaaaattatcgattatactttttgttatcgcgataattgtaagtttgatggctcttaatttaattgcaattgtcttatgggttatcgtgatgattatgttgatttctaaaaaagaatcaaaagaaacaacacataaggacgatgagtatatttatcattaatatgttcatagcaaaagaaaaaccattaaaatgttaagttgttaattattagatacaaccaacattttaatggttttatttttaactttgtagttcttggaatgtttgaacgattaaatagacatttaaaatacttagaataataataagtgtccatgaaatgatattaacccatgttttattatagaaaggtcccatcaagtctttattactagtagccaattgtaatggtattaaacagaatggcagagcaatacttaaaaatacttgagagaatacaagtagttgctcaattttagctgcattacctttaaaaatgattaagcatacgataacaggaatgacagcaagagaacgtgtaattaaacgtcttaaccaatttggtatgtgtaatcttaaaaatccttccattacaatttgtcctgctaaagtaccagtaatcgttgaattttgacctgacgctaataatgcaactgcaaataatgtactcatgattgcacccattgttgcacctagtacaggttcagtttttaaggcgtgatataaatcatagaaaccacctaaatcgtcagcattttagttgaaaaatagtgatgctcctaacactaataataagcaattgactacaaatgcgattgataactgaatgttcgaatctatcgtagcaaatttaatcgcttgcgctttttcttcattgttatgtcttgagtatgttctagattgtacaattgatgaatgtaagtacaaattatgaggcataattgtagcgccaataatacctaatgcaatatagagaatgccgttatttgtaatgatttcactatgtggtataaatccatttaacacagcattcaactgtggtgatgaaatatagacttcaaatataaagatgaataacactgtgaaaattaatgtaccaacaatagcttcaatttttctaaaaccatatttcattataaaaagtagtaaaaatacatcaagtacagttattagtgcaccgacgattaaaggtatgttaaataggagattaagagcaatagcactaccaataacctcagcaatatctgtagcgataattgctagttctgcaatgatccaaaagattatagcaataggtcttgataaataatgtcgtgtcatttgagctaagtccatacctgttgctattcctaatctcactgtcatgctttgaagtaacattgctgataaacttgaaataagaattacgaatagcaaagtatagccatattgggcgccaccttgcattgatgttatccagtttccgggatccatgtaaccaacagcgactaataacccaggtccaagaaatgataaaaatttctgtttatttgaactgcgatgatcgaatttaattgtattgtttatttcgtctaaacttaattgttcatttgttgaatgtcgtttattattcattttgactcacctctacttcttatggacaatataataacctaataaaatgtttaggccaacctaaatttattttaatttttttaaaagtatgaattattatgttgaacgttcgatttaatattaagaaaaaagagcacgaaatcatggatgtgattaagtgctctattatttaaacaaagttatttatgcagaataaaatggtaagaactgatcgaaggtttcttctaaaaatgcaataaatgctttgtcactttttaatcttttatcttgtggtgtgattgcacgcgctataaagaattcaccttttttcacattgatggctctttgtatcgcttctattaaatcatcatccgttaaatctttaataaatggtttatcaggtttcatatgatctaagcaaacacgataatcatcaggtaattgttgaatagctttaaattttctttcaaaaacttttgcacgtgttgctttatcttttgcttcatgcatgattccaaacataacaaacagttgatcttcaaacataccaatttggaaatgaggtaacattttatagcctcttttgtttgttgcaaaagcaacccatgtatctttaggaggattcacacttcttctagcatgctttgctacgtgaggataaaatgtttcaccagtttgacttgtaaagaagtcactaaaatattctcctaattcacggagttgtggtcgtatgtattcgtttaaagcttccattcgtgcgtctaagccttctacgttgaacgctttgaaatctttaggtttaaatgtatattttgtcatagagtacctcctgtatagtgtttaaaaatattgtagcatatgttttatcaattgcggcttaagacgctctcattaaaattagtattttcatttttatcataagaagttatttttataaaatgttgatgtataataaagatgttaggagatgatgttatggcactttatggatttgcccaaggacttattcaagaagcaggaattagaattaaacaattgatggagcaaaatttaacaattgaaacaaagtcaaatccgaatgaccttgttacaaatgtagataaagcaacagaagatttcatttttgatacaattttagaaacatatcccaatcatcaagtattaggtgaagaagggcatggtcatgacatcgatacttccaaaggtacggtatggattgttgacccaatagacggtacattgaattttgttcatcaacaagaaaatttcgcaatttcaattggtatttatatcgatggtaaaccttatgcaggttttgtatatgatgttatggctgatgtcttatatcatgctaaagtaggggaaggtgcatatcgtggtagccaacccttgaaaccattgaatgattctaatctaagacaaagcattattgggatcaatccgaactggttaactaaaccaattttaggagaaatctttaaagaaattgttaatgattctagaagtgcaagggcatatggtagtgcagcgcttgaaatcgtttcagttgctacaggtaatttagaagcatatatgacgccaagacttcaaccatgggattttgctggcggattggttattttatatgaagtaaatggacaagcttccaatttactaggagaaccattaacaattagtggtccaaattcaatcttagttggaaatcgtggtctccatcaagaaattagcaatgattatttagagccccaccatgatgcgttaatacaattacatgaacaacgatttaaaagaaaatcaaaataattaccaaaagcgtaatatgtagtcctaacaattaggtaacatattacgcttttataccttaaataataaaaacacgcgccaatataaaaccagttaaatgttcatcatgaacatgtgtggtcttaaatcaacgcgtgttattgtcgatataacttatagccaatcgttttctcgatattttttctttgtagtaaatccaattccaaaggttgcaacgagtaatataaatgttaaaatcatcattggtacatttgatgcaccaacagcaaaactaaataatactaagaaaacaacagctaatatagaaaatacccaaaagatatttttagattttttttgtttcatcctatccccaccttttgcttatcttttctcaattatatgatataataaaaaagttgtaattaaaagtgggattttacttaagaaagaaggaaactatttatatgactaataaaagagaagatgtccgcaatatagcaattattgctcacgttgaccatggtaaaacaactttagtagatgagttgttaaaacaatctggtatattcagagaaaatgaacatgtcgatgaacgtgcaatggactctaacgatatcgaaagagagcgtggaattacgattctagccaaaaatacggctgttgattataaaggtacacgtattaatattttggatacaccaggacatgcagactttggtggagaagtagaacgtattatgaaaatggttgatggggttgtcttagtagtagatgcgtatgaaggtacaatgcctcaaacacgttttgtacttaaaaaagcgctagaacaaaacctgaaacctgttgttgttgttaataaaattgataaaccatcagcacgtccagagggtgttgtagatgaagttttagatttatttattgaattagaagcaaacgatgaacaattagaattccctgttgtttatgcttcagcagtaaatggtacagctagcttagatcctgaaaagcaagatgataatttacaatcattatatgaaacaattattgattatgtaccagctccaattgataacagtgatgagccattacaattccaagtagcattgttggactacaatgattatgttggacgtattggtattggtcgtgtattcagaggtaaaatgcgtgtcggagataatgtatcactaattaaattagacggtacagtgaaaaacttccgtgtaactaaaatctttggttactttggattaaaacgtttagaaattgaagaagcacaagctggagatttaattgctgtttcaggtatggaagacattaatgttggtgaaactgtaacaccacatgaccatcaagaagcattgccagttctacgtattgatgagcctactcttgaaatgacatttaaagttaacaattctccatttgctggccgtgaaggtgactttgtaacagcacgtcaaattcaagaacgtttaaatcaacaattagaaacagatgtatctttgaaagtttctaacacagattctccagatacatgggtagttgctggtcgcggtgaattgcatttatcaatccttattgaaaatatgcgtcgtgaaggttatgaattacaagtttcaaaaccacaagtaattattaaagaaatagatggtgtaatgtgtgaaccatttgaacgtgtgcaatgtgaagtgccacaagaaaatgcaggtgctgttattgaatcattaggtgcacgtaaaggtgaaatggttgatatgactacaactgataatggacttacacgtttaatctttaatgtaccggctcgtggtatgattggttatacgactgaatttatgtcaatgacaagaggttacggtattattaaccatacatttgaagaatttagaccacgtattaaagcacaaattggcggtcgtcgtaatggtgcattaatttcaatggatcaaggttctgcaagtacttatgccattttgggacttgaagatagaggtgtaaacttcatggaacctggtactgaagtttatgaaggtatgattgttggtgaacataatcgtgaaaatgatttaactgttaacatcactaaaacaaaacatcaaactaacgtacgttctgcaacgaaagaccaaacacaaacaatgaatagaccgcgtattctaacattggaagaagcgttacaattcattaatgatgatgaacttgttgaggttacaccagaaagtatacgtttaagaaagaaaattttaaacaaaaatgttcgtgaaaaagaagcaaagcgtatcaaacaaatgatgcaagaaaacgaataatttaacataataaaagagaagctgagcgatgaaagttgcttagcttctcttttggcatataatatttgaaaaagtgtttaaatgctattatttcctgttactttcacattttcaaatttctaacttgtttattcagatattaatcgagcggatagtgttgcgcacgttgtttaggtgtgtctaatcgacttttacaatcatcacacataaatgttcgaataggattgtttttaagtcgtttagactcagttgtgcgctcatctataaatacttttgcatcacagataatgcattgcacttgtctcaaattaaatcacctcaatatgagttacatggttgattcgatatgaataaccatcttcttgattgtaaataaaactatctacaccattatcgctgtaaagtcgtttaccgtcttttgcaaattggaaaaataaatagggtaatagatctatcggtatatctaaatgatcatgctcatttgataatcgaatagtagttgcagagtcatgtggttcggaatgtttgaaaaatggtgtcatattaatgacaaatgaaccttctaacatggcacgttttttatattttatttctgaatttaaagtaggcggattagtttgtccttctaggatagcacgattccattcatgattatcttcaaagtcgattggttttgaaccatcaaatacacctttttctaaatcttcgatgctaacttttctatcatcgaaaatccaagtcgtactatctaatgttataggaaactttacggctcctttaatttgtatcattttcccactccctatcaatgtatatagcattattttaacacaaattgctaacgacacattttaaatctacttgctttttaatatttagtaagataaacttttagtaagacttgagaatttatatagagggggagcgtgtcatggcgaaacaagcaacaatgaaaaatgcagctttgaaacaattgactaaagatgctgatgaaatcttgcatctgattaaagttcaactagataatttaacattaccttcatgcccattatatgaagaagtactagatacacaaatgtttggacttcaaaaagaagttgattttgctgttaaattaggtttagttgaccgcgaagatggcaaacaaattatgttacgtcttgagaaagaactttcaaaattacatgaagcttttacacttgtttaaggtttaatatataagcatattaaaatggcgtgagatatcgacaattgagctgcgccgattttatatttatagtttaattactgattaaagtggctgttatgttgtcttcttgatgacatgtcagtcacttttattgggttttagcaattcacgatattaagtaaacaaatattctataaattacctcaagagacctgttaatatttgtgattatgactgtgtcatgtatataataagtaacatggatttttaaaattaaagtataaaacgaaatcatttgaagtataaattgtagaattggatgactgaatatatgaagaattttagaagtattttacggtatattggtaaaacctcaaagtttattgattatccgttattagttacatatattgtattgagtttaattggattagtgatggtatatagtgcaagtatggttccagcaactaaaggcacattgactggtggtatcgatgttccaggaacgtatttttacaaccgacaattagcatatgtcataatgagttttataattgtattttttattgcatttttaatgaatgttaaattactgagtaatattaaagtgcaaaaaggtatgattataactatcgtctcactattattactgacgttagtaataggtaaagatattaatggttctaaaagttggataaacttaggatttatgaacttacaggcatctgagttattaaaaattgcaatcatattatatatcccatttatgatcagtaaaaaaatgcctagagtattaagtaaaccaaaattaattttaagtcctattgtattagcattaggttgtacgtttttagttttcctacaaaaagacgtagggcaaacattactaatattaattattttagttgcgatcattttttattcaggaattggggtaaacaaagtcctaagatttggtataccagcagtgctaggattcttagtagtatttgtcattgcattaatggctggttggttaccaagttatttaactgccagatttagtacgctaacagatccattccaattcgaatcaggaactggataccatatttccaattcattgcttgcgataggtaacggtggcgtatttggaaaaggattaggaaatagtgcaatgaaattgggctatttaccagaaccacatacagattttatttttgcaattatttgcgaagaattaggtttaatcggaggattgctagttattactttagagttctttattgtatatcgtgccttccagtttgcaaataaaacatcatcatatttttataaacttgtgtgtgttgggattgccacatactttggaagtcaaacgtttgtaaacattggcggtatttcggcaacaattccattaactggtgtgccattgccatttatcagctttggtggatcatcaatgattagtttaagtattgctatgggtttacttctgattgtaggtaaacaaatcaaagtagaccagcaacgaaagaaacaacaacaaaaagttgatataagaagacaatttaattaaaaaaatactagccaatatttagtacgagatgacttctgtcattaagcaatgctaaacattggctatttatatactctttgtcaaattggactgatgagttcaataacggaagttaggcaaccaaacaacgcttaacttcctttttgttttgatattacgagattactcatgattatcaaattttataaacaaaacaacgtataattataactaaattttatgactaaaaattactaaatgtggtggcgaaattagaatcatgatgataagataaagttatcgctattgataataaatgttgatgttttgcaattttatttttaattttttagagttgtagaaatcgaaaatgtttcacaacaaaaacgtgaactacctgttgttgcatagtcatttttgaaattattatttctgaagcggaggttttaattgtctcaagaatgttaaattttgaaaatttgaaacataactatagcaaaacagagcgctttaagataaaattttattatctaattagttagaaaattctaatagtttgaggagtgtatcgctattgaaacaaataaaaaagttacttgttgctaaccgtggagaaattgcaattcgtatattcagagcggcggcagaattagacatcagcacagttgcaatttattcgaatgaagacaaaagttcattacatagatataaagcagatgaatcctatttagttggaagtgatttaggtcctgctgaaagttatttaaatattgagcgtatcattgatgtagcaaaacaagcgaatgtggatgcgattcatcctggctatggatttttaagtgaaaatgaacaatttgcgcgtcgttgtgcagaagaaggaattaaatttattggtcctcatttagaacatttagatatgtttggagataaagttaaagctcgtacaacggctatcaaggcagatttaccagttattcctggtacagacggtccaattaaatcatatgaattagcaaaagaatttgcagaagaagctggtttcccgctaatgattaaagccacaagtggtggcggcggtaaaggtatgagaatcgttcgtgaagaaagtgaattagaagatgctttccatagagcaaaatcagaagctgaaaaatcatttggtaatagtgaagtttacatagaaagatacattgataatccaaagcatattgaagtacaagtcataggtgacgaacatggaaatatcgtacacttatttgaacgtgattgttcagtacaacgtcgtcatcaaaaagttgtagaagttgcaccatcagttggattatcatcaacattacgtcaacgtatttgtgatgctgcaattcaattgatggaaaatattaaatatgtcaatgcaggtactgttgaatttctagtatctggtgacgaattcttctttatagaagttaaccctcgtgtacaagtagagcatacaattacagagatggtaacaggaattgatattgttaagacacaaattttagttgcagcaggtgccgatttatttggtgaagagattaatatgccgcaacaaaaagatattacaacattaggctatgccatccaatgtcgtattacaacagaagatccgttaaatgatttcatgccggatactggaacaatcattgcttatcgttcaagcgggggctttggtgtacgtcttgatgctggagatggtttccaaggtgctgagatatcaccttattatgattcattactcgtaaaattatctacacacgcgatatcatttaaacaagcagaagaaaaaatggtacgctcattacgagaaatgcgtattcgtggtgttaaaactaatattccattcttaattaatgtaatgaagaataaaaagttcacaagtggtgattacacaactaaatttattgaagaaacaccagaacttttcgacattcagccgtctctagatagaggtactaaaacattagaatatataggtaatgtaacaattaatggtttcccaaatgttgagaaacgtccgaaaccagactatgaattagcatcaattccaactgtatcttcaagtaaaatcgcttcatttagtggtacgaaacaattgcttgatgaagtaggtccaaaaggtgtagctgaatgggttaaaaagcaggatgatgtcttactaacagatacaacctttagagatgcacaccaatcattattagctacacgagttagaactaaggatatgattaatatcgcatccaaaacagcggacgtatttaaagatggtttctcactagaaatgtggggcggtgctacatttgatgtggcatataatttcttgaaggaaaacccatgggaacgacttgaacgtctacgtaaagctattccaaatgtattattccaaatgttgttacgtgcttcaaacgcagttggttataaaaactatcctgataatgttattcataaattcgtacaagaaagtgctaaagcaggcataaatgtctttagaattttcgattcattaaactgggtagatcaaatgaaagttgccaatgaagcagtacaagaagcgggcaaaatctcagaaggtactatttgttatacaggtgacattttaaatcctgagcgatcaaacatttatactttagagtattatgtcaaactagctaaagagttagaacgtgaaggtttccatattttagcgattaaagatatggcaggcttattaaaacctaaagccgcttacgaattgattggtgagttaaaatcagctgtagatttaccaattcatcttcacactcatgatacaagtggtaatggtttattaacatacaaacaagcaatagatgctggtgtcgatatcattgatactgctgttgcttcaatgagtggtttaacaagtcagccaagcgccaattcgttatattatgcattaaatggcttcccacgccaccttagaactgatattgaaggtatggagtcacttagtcattattggtcaactgtacgtacttattattcagactttgaaagtgatatcaaatcaccgaatactgaaatttatcaacatgaaatgcctggtggacagtattcgaatttaagtcaacaagctaaaagtttaggtttaggcgaaagatttgatgaagtcaaagatatgtatcgcagagtgaatttcttatttggtgatatcgtaaaagtaacaccatcgtctaaagtagttggtgatatggcactttatatggtacaaaatgatcttgatgaacaatccgtgattacagatggctataaattagatttcccagaatcagtagtgtcgttcttcaaaggtgaaataggacaacctgtaaatggttttaataaagatttacaagcggttattttaaaaggccaagaagcactaacagctcgtccaggtgaatatctagagccagttgattttgaaaaagtccgtgagttgcttgaagaagagcaacaaggtcctgttacggagcaagatattattagttatgtactatatccaaaagtatatgaacaatatattcaaactagaaatcaatacggaaacttatcgttacttgatacgcctacattcttctttggaatgcgtaatggtgaaacagtagaaatcgaaatcgataaaggtaaacgattaattattaaactagaaacgattagtgaaccagatgaaaatggtaatagaacgatttactatgcgatgaatggtcaagcgagacgtatttacattaaagatgaaaatgtgcatacaaatgcgaacgttaagccaaaagcagataagagtaatccaagtcatatcggtgctcaaatgccaggttcagtaactgaagtcaaggttagtgtaggtgaaactgtgaaagctaatcagccgttgctaattactgaagctatgaaaatggaaacaacaattcaagcaccatttgacggtgtgattaaacaagtaactgtaaataatggtgacacaatagcgacaggcgatttattaatcgaaattgaaaaagcaactgactaaaatgattaaaataaaacgagattacacaacaattgacgtgtaatctcgtttttacatggcttaggtttaattttaaatattgatataaaaaaccgtaattttaatgggcgtgccattaaaattacggtttgcttttttgttattgcttgtcacttcttactgatcgtaacattagcatgataaagtatgttgtcataccaaataaataagtgataaataatgcatggaaaagtgcgattatcaggttaacatttgtcataatagataatgcacctgtgataacttgtaatataacaagtataaatgcagctgtataaccataatgaacagtacggttatttggataatttttaacagcgtgaatataagtaatcataataatcgtaaacactataaaagccatgatacgatgcgtgagttgaacccaatcttgttctgaatgtggtacaagatcgtggaatggcaatggccaaccaccatatgctaaacttgcatccgcatgtctcactagtgcaccagtataaacaccacaataaatgatgattgccattaaccatgttaaacgtcttaatggctttttgatatataattcgtcagcttcatatttttgatctatagagaaaataatcaatgttattaaaaatacagatgagaaactgattaatgatataccaaagtgcaatgctaaaacgtaatcgttttgttgccaaataacagcagcagctccgattaatgcttgcaataataagaatccaacactaatgattgataaaggtttaatttctttaatatagcctatatgtttccatgcagtgataactaaccataagaccattaataaagacaaagctgaaacggctctatgacttaactcaataatcgtatcaataggaaagaattctggaatcaacgcaccatgacatagtggccaagaagaaccacaaccatcagctgatccggttttggtaactaaggctccaccaagttgtacaaatgtcatcattaacgttgctacgacacctaaccattttaaattctttttgccaaacaatttatacaccccatcataaaaaaacgcatcactgagaattagaattaatagccggatttgagatgatactataaatagacctgattgtaggatatgaaaagatgggatccaacgcaggaaatatgatttaattttacaagtattgtatgtggacgacataaaaagaacttaatcgtaatgatttttttattgggataattatgtaatccacgtttactcaaatttgaagcttaaatattaatctcttttagatgcatgattctacttattaaaattttctaacatatacattatagcaataaattaaatgttatttgtgtcacaaaattgacattttctcttgtcgttaatttgtcacaatttaattttattaaacctagtctttttatgcaatctaagatatcataatcttatatgaacaaatttaaggagggggattatgagcaaagagcatactttgtcacaaaatattagcagagttaacttcaaagaattgcaacagataattaaaatgggacttgttcaaggtaacttaattccggcttttgcgggcgcatggctagcagttgtaatgacaaatcattccttcttatcatcaatacctcaaattttattaatgctatttggatctactttaattatgggtggcgcatgtgcgttaaataattattacgaccaagatattgatcgtattatgcctagtaaacaaaatagaccaactgtaaataatagaattacagatcaaaatttattactattaagttttggtatgatgttagttggagaaatttgtttgtttttattgaatataccatcaggcgtacttggtcttatggggattgtaggttatgtgtcttattactcaatatggtctaaaagacatacaacatggaacacagtgattgggagttttcctggagcagtaccaccactaattggatgggttgcaattgaaggacaaattagtttaacagcgattgcgctgtttttagttgtattttgttggcaaccaattcatttttatgccttagctattaaacgtaaagatgaatatgcacttgcaaatattccaatgttaccatcagttaagggctttaaacgtacacgtgtcagtatgtttatctggttgattattttattgccagtacctttattactaataaatttaggtgtcgtattcgtagtgttagctaccttattaaatttaggatggattgcattaggtttaacaacatttaagaaaaattcagatcaaacaaaatgggcaacacaaatgtttatatattcactaaattatttagtgatctttttcgtgttagctgtgattgtttcattacttactttgatctagattaattaagttaggatgaaaaatatgggcgttccaattttaccaacgattagtacgacatgtattgtcattagtgcaattttaattgccattggttggagacttatttggaaaagggaaataaataaacacaaaaatgttatgttagctgcagctgtttttgctttaacttttttcttaatctatgcaagtagaacgatttttatcggtaatacagcatttggcggaccagcatcaattaagaaatattatacgattttcttatttttccacattaatttagcaacaattggtggtattctaggcctagttcaaattattactgcatttaaagataaatataatgtacaccgcaaattcgggccattcgcttcagttatatggttctgtactgcaattacaggtgtagcagtttacttattattatatgtattatatccaggtggagaaacgacatcactgattaaagcaacatttggtcattaatatgcttatacaaatgatactaatctgataaggcaatttgttttatcaggttttttgatgaagaatagtcggacagttgatggtattcatttgataccttaactgtccatttttttatacatattttaatcttaataatgaaattcaacctgaaaacataaagataggttatgatatagagtgtagggaaaatctttatgacgttaaaattatgcctgaagatgattttgttttatcgaaacgacacagttatgtcagtgttgaaaatttgctaattaatgtgttgttttttacaatagtattaatactttttaggtggttgattgatgaaaaagttaattataagagtcgtcggtgtattatttttagttggatttttaatatatcttttttattcaccgagattaaaatttgatgtattagagaacccgaataaaggtaataaagtaaatagatctgaacaggtgaataaatcaaataaccatgctgaaaatccaaagcctaaagaaggtgttggtacatgggtaggtaaagatattaaagtgcttacttctaaatttggacaagcagatcgtgtctacccttttagagatggttacaaaaattatgtgtttaaagacaaaaacagttattacattgtttcaactaaacgtgaagaaatcgtttcagtgtatgctacaggtgagaaagtcaatgttagtccgttaaaaataggacaacattctgcagaaatttttaatcatacaagtattaatccagaaccgtcctttaaagttgatggtaaaaaatatgaatttgaactttcagatgaagatttaaaaacacaaacactgattaaatatggcgacatatatgcacaagtgtattctgatcaacaatcgaaaaaggtgctaagtgtacgatttttaacaaaagaaatgttagcagatattgaaccttatcaattaaattctaattctacgtcagaagagcataataagcgtccagttgagcaaaatccaaatcaattaatttctctttatgaagtaacgaatgaaatgagaaaattaaaaggattaaaaccattgaaaatcaatagcgatttagcacatattgcatctaataacttatatgaagcgacctctaatggttctgatagtgttgaatttacagaggacgcattaagagggcaattagataaaaatcacgttacttataaaacaactgctcaaaatgttggttatgcgtttaatgatgtaccaacattaatccatagttggatgaattcagatatacatcgatctcgtctattaaattcaaaatacgatgagatgggtggagatgtaatgagagattattattcactaattttcttagaaaaataacaatgaggggtatttatgattaatgaagcttcactagcgatattagatgatattgatgaactagctgatatgatagttgcatcagatatttatgcatcatttgagcaagctaaacaggcgctcgaaaacaatgacgaagcacatttactttatcaatcatttttaaaatcaaaagagaaatatgatgaagtaatgcgattcgggaaatatcatcctgattataagaaagttatgttagagacaagacaacgcaaaagagcatatgagatgcttgacgttgtgatgcattacaaagctagggaaatggcacttcaacatttaatagatgaagttgttacgaaaattgcgtacgctgtttcagaacatgtcaaaatagaaacaggtaatccattctttcaaacatcacatagtggttgtgcgacgggcggatcctgtaattgttcattataaaaaacatcgagtcagaaaaaggtggttattgaaaccactaactagcatctgactcgatgtttttatttattcgggattgtttgtttgaattgttgtgctaaatctggtcgatctgtcacaatcgtgtgtgcacctttttggtataaatcattcatcagatttatactatttacgccataatagcctggaatgatattcatatcatttaaccatttgataaaacgagatgaagtcaaatcaatgcctttaaaatgagtaggcatttggaacgtttgtgctaatggttggtagtacctaccacctaataaatgatattttaaaaatgcttctgtaacttcctgttggctagcaccaattgcgacggatccttgtgcaattttattaaaacgaacgatttgttctttataaaaacttgtcacaagaacgcggtcaaatgcttgattttctgcaattgtatcaaacataatttgtggtgcgattgagccttcataggattcaggagcatcttttaagtctacgtttatatacatatcaggatattgcttcagcaactcatcgaaggttagtatagctgtgtgtgcatgaccacgatatggtgttagtccattgatatctttgaagtgataagctgcgtctaatttctttaattctgctaatgtatgggcactaacttttccagagccgttcgtcgttctatcaacagttgcgtcatgaaaaacgataagctgttgatcttttgtgagtctcacatctgtttcaaagccatcaacgcctaattgtttagcatagtcaaatgcaagttgcgtttgctctggtcttaaagccataccaccgcgatgcgcaaatatatatggtgcattgcctttgaaaaaagcagggatggtttgctttttagtaatcactttatttttattgatcattaatagactacttaaaaatccagcaccgactagtaccgcatttaaaatgtttctgtttacttttttcataaaaaattcctcctcgtttacttttatagcttaacaaattcatagttctgactacagcgaaatgtgtggttaatcatatagtgatgctcttgagaattgaattaatataatgatgtttaatataatctaaatacatttatcgagcaattacataagacataattaaggtagcttaatattttaaaattaataaagacatgatatgattaatgctgaaaataaatggagtgaggtttaaatgaatttaatcccaagaactagtattgtagtttatttaaaacatatgaaacatgaacgacaaatccgaaaatatggacatatcgttcattcaaatagagatcgtaaatttgtaattatgtatgtgaatgagcaagatgttgatcaaattgtacataaactaatgcaacttaaatacgttagacacattgatggctcaccatataaatacttaaagaaaacttacgaaaaagagaaacacgaaatatataattaatattattgaagttctggtatccatttttggagccttaacacactaattaaataattataatataacgataaatcatgaaatgcttgagggggctgtacatcgatacctaaaattggtatgtcgaatttttcagcacaatcatttatcatttgaaactttttatttgaatctggatatggatatttaatagcgtttatcatgatataaaatgcttggaaatgattgccagttgtagggttcataatgattgctacagatgactttttattttcagcttgtggtgaatgaaaatagataattttatcaatacgttgatggttatattcaatcatcgtcatgaattcgaacaaatctgttagaccttcaccaagtgtaataaatgtttgtttcattggtttatcattctcctttttctcaataaattatattaaataactaaatgaattggaagtgtgaacaacatgcgcgtcattgcaggtaaacataaaagtaaagctttagaaagtatggaaggccgtaatacgagaccaactatggataaagttaaagaaggtatctttaatagtttatatgatgtgtcaggtataggtttagatttatttgcaggaagcggggcgcttggaatagaagcactctctcgaggtatggataaggtaatctttgttgatcaaaattttaaagctgtaaaagttattaaatcaaatcttgcgaatttggatttagaggcacaatctgaagtttataaaaataatgcagatagagctttaaaagcattgtcaaaacgtgatattcaatttgatgtcattttcttagatccaccttataataaaggtctcattgataaagctttaaaactaatttcagagtttaatttattgaaagaaaatggtatcatcgtttgtgaatttagcaatcatgaagaaatagattatcaaccgtttaatatgattaaacgttaccattatgggttgacagacacattgttattagaaaagggagaatagcatggaacatacaatagcggtcattccgggtagttttgaccccattacttatggtcatttagacattattgagagaagtacagatagatttgatgaaattcatgtctgtgttcttaaaaatagtaaaaaagaaggtacgtttagtttagaagagcgtatggatttaattgaacaatctgttaaacatttacctaatgtcaaggttcatcaatttagtggtttactagtcgattattgtgaacaagtaggagctaaaacaatcatacgtggtttaagagcagtcagtgattttgaatatgaattacgcttaacttcaatgaataaaaagttgaacaatgaaattgaaacgttatatatgatgtctagtactaattattcatttataagttcaagtattgttaaagaagttgcagcttatcgagcagatatttctgaattcgttccaccttatgttgaaaaggcattgaagaagaaatttaagtaataaaaataacagtattttaggtttatcatggtttacaatcctaaaatactgttttcatttgttaacgatattgctgtatgacaggcgtgttgaaatctgtttgttgttgcccgcttattgcattgtatatgtgtgttgctttgatttcatttgtgaagtaatgtgcattgcttttgttaatattggttatatattgtctttctgggaacgctgtttttaaatgctttaaatattgtctgccacggtcgttcatcgctaatactttaactgcgtgaatgttactcgtaacatctgtaggtttaatgtttaataatacattcattaacagtctttggatatgcgtatatgtataacgctttgtttttagtaattttacaaaatgatgaaaatcagttgcttcataaatgttagatttcaaacgattttcaaaaccttcagtaacagtataaatattttttaatgaatctgtagtcatagctatgatttgatatttcaaatatggaaatatttgatttaatgttatatgaggtgttacgtacaagtgttgaatatctttaggtaccacatgatgccaatgatcatcttgactaatgattgatgttctaatagatgtaccacttgcaaactgatggtgttgaattaatgaatcatgatgttgagcattttctcgtttgatagaaattgcattgatgtttttagcatttttagcaattgctttcaggtaactaataccaagtatgttgttaggacttgctagtgcttcatgatgctctaataattcgctaatgatacgagggtagcttttaccttcttttactttttgtgaaaaggattcagattgttcaatttcattaatgctgtgtgctaattgctttaatgttttgatatcattattttcactaccaaatgcaattgtatcgacactcatataatctgcgactttaactgctagttcggcaaaatgatcgccagatgataaactggcagttgctggtagttcgataactaaatcagctgttgataatgccatttttgcacgagtaaacttattatagattgctggttcgccacgcatgacaaagttaccactcattattgcaatagtaacgtcagcatttgtaagttttttagattgattaatatgatattgatgcccattatgaaagggattatattctgtgattaagccaacgcttttcatttgcaattcgtcctttcggtattcattattaatattgtaacagaacatgatatgttaagaaaaaatcttgacaacttgttcttagaaagttaaaataaattttgtgcttgttagaggtgaagccatatgaaatggtcaattacgcaattaaggaaatatcaaggtaagccatttgaatttgatcaaacggtgagttttgacaatttaaaagaatcattagatttaattgatttatctccaattacaatccaaggtcagttaaccattaagtcaacagaagtcgttgcggatattcacattactggaacgtatacaatgccttgtgcacgtactcttgtaccagtaaaagtcccactagatgtaactactacagaagtatttgatttagaagggtacaatcagtataacgatgatcaagatgatgtagatgaacactatcacattattaaagatggtatggttaatcttcaggatattgtcgaggatatagttattattgagaaaccaatgagagcttattcagagcaaagtgaccaaatgttgacagtaggtaatggttgggaagtaatcgatgaggatcaattagatgagcttgctaaacagcaagaacaagatgattcagaatcacgacaagttgatccaaggcttcaaaaattacaacaattatatgataaagagcaataagtagtttaattaatgatataatgttgttaattaaactaacatttagtatttttcgtttataatctaaggaggatatatcatggcagtaccaaaaagaagaacttctaaaactagaaaaaacaaacgtcgtacgcatttcaaaatttcagtaccaggtatgactgaatgcccaaactgtggcgaatacaaattatcacaccgtgtatgtaaaaactgtggttcttacaatggcgaagaagtagcagctaaataattttagttactcaatataaaaagtcccgcttaaaatgattgttttaagtgggactttttatattgcgaaaaataattggcgaacgaggtaactggatacctcatccgccaattaaaatttgttaatttaataattaaatataaagacgatttattagtttttacgttttctaggtaatacgaatgcaacgatgctacttaaagctaataatgccattaatggtaatgtcatatctttatttgattcttcaccagtttgtggtaatgattttgctttattttcttgtgtatttttattgttttggctttgagtgtgtccatcatttgtgtttttaatgtttgctttttgtaatggagcactatcttttgcttcgctagaacctgctgaagtttgaacaacatcttttgttgtttttgatgaagcagttgttggttttgcaacattttgagtcgtagatactaccttagttggagttgtactacttgattctacttcacctttagttggttttgtagcaggcgttttgtctttacctgactcactagatgcgtcattttctttttcaacacttggtaattgtttattgtcatctttttggctgtcttgtttttgtgattctttttcaacaggtgatggtgttggtttgctaggcgtagctggagtagcttccttcttagctgagttatcttgttgttcttttttgttagatttatcggtattggcttttgtaaatgcttctttatcaacgattctgacatggtattgtccatcataatcaatcgtttttacgtgaactttaacgatagcatcatatagagttttaccttcaacatatgggaaaataattgttctagtattatttttagcatctttgcttatagttctaacacgttgaccttcaaccatgaaatctttccagtaatcgtcattagtagtttccatgaccatatattttttgccgttaagcatacctgttttaatagggtgtttaacaaaagtatccatcatagattcgttattctcaacactttcataaacaacatattttgtatcttgtaaatcagtcattttttcatttgttggttgtacattttggaattcagtaatagctgatttcacttgctcatctaaagctttctttgtatcctctaatttcttcttgtactcagcctttaatttttcaggaagtttatcttgaattttatttaattcataaacttgtctttctagtgttttcgcttttttatatggcgctaataatttttcagctttataatcttcttcagttttgaatttatctgcactgttataaattggttgtgcgaattccattaatgtgtaatcgtatttttcttctttgttattgaagtgtgttgaactaacaattttaacagcttttgttccgtttgatacagagaagcgaatgtaagcataatctttaacagtatcgtatgatactaatttaattggcaactttttgtcaccttcataaacttcaaattttctccaaaattgacctgattgtaatcctaattcaatttctggttttgaatcagtgaaaataactctagcaggtttaacagaacttgcataatgataaaactgttgagttccatctttctttttcatttcaaaatcaattggacgagagtttggtgcgctatgatctttgtcttttattgcagggtttttaatcgcttctctaagttcctgattcaaaataggatatgtattgttagtggcttttgctgctggtttaacttcttttgtttccttaggggctttaacttctttaacttctttagcttcttttgtttcagaagtaggggcctcaacttctttattagatactgagacagcattagctactggtttagtttctggagctttttcagatgttgttgttggacttgcaactgcttcagtttttggttgtgcttctgtatttgtaccacctgtttcttcagctgctgcttgtgcttcgccatttgacattaataataaaagtgtactaattgctacagatgcaacgcctagtgatgactttctaattgaataaaatgatttaaattctttttgctgtttgttcatgttgtagaaacaactcctaattgtatattatcaactgataatcattatcaattgattacttgtattgtacattgaaatgttagttaattgcaacgttattttataaaaaaaataacctatgttatagattatgaaatatctatgacataggttaaataaaatttaaaataaaaaatatattaagttatgagtgtgacgatgatttatttagattcttttcttttgaaaagtaataaagataatgaacctaaaagggcaagtgttgcgaaggcaactgtgctaataaagttatcaactgaagttaaaccagtttttggtaattctttagctttagatgcttgtttaggcgtttcgttatgttttgtaactttgttagtttgttgtgatttattatcacttacagcttgattgttgctttcagatttcgctgttgcaacatctttaacaggtgtttgaactttattttgttcttgagcagtttgtgctgttttaactgtatgagcagtttgtgttttagtttgatcttttgttgtgtcagtacttacaactttagtagagtgattgtcttcaactttgcttgttgtagttacagtaggtttaactttttcaactttaggttgaactggtttagtttgctcagtaggtgttttaggttgagctggttttggttgaaccggtttaacattgtttggttttgctgcgtcagctaatgtaggaattgctttttcaaattccaaatgcgtagtatatctatgattgtaattaatttgtggcacgacaatatgtactttagtagttaagctcttatatccaggttcaactgcaacattgattgttctagtatccgcttttttattatcgttaacaacagttgttgctaattcttgattgtttgcattgtaaaatttgtattctttccagaatgatgcattgtttaacacggtttggaaataatatttattattttgtttaattactttaccagggtgttgcatatagtcatccatgtgtgacttctctgaagagccatctttttgcacttggaaattaattggttgtgatgttgcttgagaaacttgtgtgctttgattattagttgcgttcgtagcttctgttgccgcattgacttgttggctgtctgcgcctatgtatacaagggaacctaaaatgatagatgctgtacccattgtaatctttttcatagctgatgaacgttgttctgattgatacttactgtttaaataatgttttgtcatgttgttttcctcctaaggatacaaattatgtgttgttatatgagatgattaaccattgcaattgataatggttatcaattatactagcacatctattttcgtataacaataataaattgattataaaataaatattgacaatgataatcattattatttatgattttactaaagacttaaaagcaatcataaaaaggaggattatgttttgaaaaatattttaaaagtttttaatacaacgattttagcgttaattatcatcatcgcgacattcagtaattctgcaaatgccgcagatagcggtactttgaattatgaggtttacaaatacaataccaatgacacgtcaattgctaatgactattttaataaaccggcaaagtacattaagaaaaatggtaaattgtatgttcaaataactgtcaaccacagtcattggattactggaatgagtatcgaaggacataaagaaaatattattagtaaaaacactgccaaagatgaacgcacttctgaatttgaagtaagtaagttgaacggtaaaatagatggaaaaattgacgtttatatcgatgaaaaagtaaatggaaagccattcaaatatgaccatcattacaacattacatataaatttaatggaccaactgatgtagcaggtgctaatgcaccaggtaaagatgataaaaattctgcttcaggtagtgacaaaggatctgatggaacgactactggtcaaagtgaatctaatagttcgaataaagacaaagtagaaaatccacaaacaaatgctggtacacctgcatatatatatgcaataccagttgcatccttagcattattaatcgcaatcacattgtttgttagaaaaaaatctaaaggcaatgtggaataatgagaaatgttaaacaaattgctacaaaatctattatagctattattagcttaggtatacttacatatacaacaatgattggtagcgtgttggctgatgagataaaatatccatcagccaaatttaatcaacctgaagcaaaagataaaacagaattaactacatcaatttttgatgaaaagataaaagagaataaagcgttagagttactaatttttaatcaagaaaataaaaatgtaactgaggaacaacaactagttgacgaaaaggcgcaattgatttcagatatgactggtaaaatttacttgcaagtaaagctaaaaggtcaaatagataaagaacaacttgtttttcaaaatgacaaaaatgaagaatttccttttgttataaaagatgaaaaggatgacacaatagtaagaattttaattgaacagcatatggataaaatcaatatgcatgttaaaacgttggctgaaaagaaaaatctagataacaaagaaatggtgtattctattcattttaaagagaaaaaagtacaacatgatgatgcaaaagaagtgccttcaaaacatcaaaatcaagaaaataatcaagatcagcttaaaaaagatattgatgacaaaaaagatagtcaaaaatcagatactaaggaaagacgtactagcctttttactgaaaaaggattaaatgatattcctgtacaaaaagataaagtgcaacaagacagtaataaaaagattgaaaatgagcgacctaaagcatcaggtacattaaaagttgaaaatagccctccaacaataaaaaaggttgaaaataatcacaaagagcaaccgaaacataaagatgaaaaatcaaaaaaggaaaagaaaaaagtagttgaaaaagaaaaagcgttaccagcttttaatagagatgatgatagcaagaatagtagtcaattatctagtgatattaaagaacttgatgaaccaaatcataaaaagcaatatatgttatttgcagctggcattgtgttagcaactattttacttatttcggcacatttatacagcagaaagagaggtaaccaagtttgagaatcataaagtatttaaccattttagtgataagcgtcgttatcttaaccagctgtcaatcttccagttctcaagaatcaactaaatccggcgaattcagaatcgtaccaacaactgttgcattgacaatgacattggacaaattggatttaccaattgtcggcaaacccacgtcatataagacattgcctaatcgttataaagatgtaccggaaattggtcaaccaatggagccgaatgttgaagctgttaaaaagttaaaaccaacacatgttttgagtgtgtcaacgattaaagatgaaatgcaaccattttacaaacaattaaatatgaaaggctacttttatgattttgatagtttaaaagggatgcaaaagtcgattacacaattaggtgatcaatttaatcgtaaagcacaagcaaaagaattaaatgaccatttaaattctgtaaagcaaaaaattgaaaataaagcagctaaacaaaagaaacatcccaaagtattaatattaatgggtgtaccgggtagctatttagtagcaactgataaatcatatattggtgatttagttaaaatagcaggtggagaaaatgttattaaagtgaaagatcgtcaatatatttcgtctaatactgaaaatttgttgaatatcaatccagatattattttacgattaccacacggaatgcctgaagaagttaagaaaatgtttcaaaaagaatttaaacaaaatgatatttggaaacattttaaagctgtgaaaaataatcatgtttatgacttagaggaagtgccattcggtattacagcaaatgttgatgctgataaggcaatgactcaattatatgatttattttataaggataaaaaatagtgagttgatatgatgataaaaaataaaaagaaactactatttttatgtttgttagtcattttaatcgcaactgcttatatttcgtttgtaaccggtacaattaaattgtcatttaatgacctatttacaaaatttacaactggtagcaatgaagcagtggattcaatcattgatttgcgattgccacgtatattaattgcattgatggttggcgcaatgttagcagtttctggagcattattacaagcagcactacaaaatcctttggcagaggcgaatatcattggcgtttcctcaggtgcacttataatgagagcactttgtatgttgtttattccacaattgtacttttacttaccattattaagttttattggaggtttaataccatttttaataattatattgttgcattctaaatttagattcaatgctgtaagtatgatattagtaggtgttgcgttattcgtattattaaatggtgttttagaaattttaactcaaaaccctttaatgaaaattcctcaaggcttaacaatgaaaatatggagcgacgtatacatattagcagtatcagcattattgggattaatattaacattactattgtcccctaaattgaatttactaaatttagacgacatacaagcgcgaagtatcggttttaatattgatcgttacagatggttaacaggtttattagcagtatttttagcaagtgcaactgttgcgattgttggacaactagcctttttaggtattattgtgcacatgtggttagaaagctagttgggggcaattacagagtacttattccgttttctacagttattggtgcatggctattgttagtggctgatttattaggacgagtgatacagcctcctttagaaattccagccaatgctattttaatgattgtcggtggtccaatgctaatttacttaatttgtcaaagtcaacgaaatcgaatctaaaacggtacaacaactggtttagtgatgactgaagaaacgtcgttaataaaagaggatttttatgagaatgaagcgatttttaactattgtacaaattttattggttgtaattattatcatttttggttacaaaattgttcaaacatatattgaagacaagcaagaacgcgcaaattatgagaaattacaacaaaaatttcaaatgctgatgagcaaacatcaagaacatgtgagaccacaatttgaatcacttgaaaaaataaataaagacattgttggatggataaaattatcaggaacatcattaaattatccagtactacaaggtaagacaaatcacgattatttaaatttagattttgagcgagaacatcgacgtaaaggtagtatttttatggattttagaaatgaattgaagaatttaaatcataatactattttatacgggcaccatgtcggtgataatacgatgtttgatgtgttagaagattatttaaagcaatcgttttatgaaaaacacaagataattgaatttgacaataaatatggtaaatatcaattgcaagtatttagtgcatataaaactactactaaagataattacatacgtacagattttgaaaatgatcaagattatcaacaatttttagatgagacaaaacgtaaatctgtaattaattcagatgttaatgtaacggtaaaagatagaataatgactttatcaacgtgcgaagatgcatatagtgaaacgacgaaaagaattgttgttgtcgcaaaaataattaaggtaagttaaacagaaaagaggataattatgaaatttatggcagaaaataggctgacgttaacaaaaggaacagcaaaagatattatagaacgattttacacgagacatgggattgaaacattagaaggctttgatggcatgtttgttacacaaactttagaacaagaagattttgatgaagtgaaaattttaacagtttggaaatcaaagcaagcttttacggattggttaaaatctgatgtctttaaagcagcgcataaacatgttagaagtaaaaatgaagatgaaagtagcccgattataaataacaaagtaattacatatgatataggctatagttacatgaaataattggatttaaagaggttgcagtacttgttatgacaattggtattgttagcttttgtaacgaccatacatgataccgatgatggtcgtttttttaatgaacacaaacatgctaacaacaaattgctaaaacatagtttgatttgaatgtgctttgaaaataatcatcaattatatcattttgatttattttgaagaagaaaagaattaataatgatattttggggcgtatgatttatagtagtagtatcgataaaagaaatttatacaatttgaaatattatgagtgataaaagcgattaattaatattaactatacaatcaaatgttttcatcttattaatgattaatatttttatttttaaaaataaagcgaggagctatcaatggaacaaattacttctgcacaaaataatagaattaaacaagcgaacaagctaaaaaagaaacgtgagagggataaaactggattagctttaattgaaggtgtgcatttaattgaagaagcttatcaaagtggaattgtaattacacaattatttgcaattgaaccggcaagattagatcagcaaattatcgcatacgcgcaagaagtttttgaaataaacatgaaagttgctgaatctttatcaggtacagtgacaccacaagggtttttcgcaatcattgagaagccgcattatgatatttctaaagcacaacaagtattgctcatcgatcgtgttcaagatcctggaaatttaggcacattaattagaactgcggatgctgctggaatggatgctgtaataatggagaagggtacgacagatccttatcaagataaagtgttgcgagcgagtcaaggtagtgttttccatttgccagttatgacacaagatctcgatacgtttattactcaatttaatggtcctgtttatggtacagcacttgaaaacgcagtggcatacaaagaagttacttcaagtgattcttttgcattactattaggtaatgagggagaaggtgttaatcctgaattattagcacatactacacaaaatttaatcatacctatttatggtaaagctgaaagtttaaatgtagcgattgcaggtagtattttactttatcatttgaaaggttgaccgtgttgaaagttttccgatataattataattaattgtttaacagaacatttctacgtgaatgcatacacaattgaatataaaccaataaaaaggcatggacatttatataaataattgttttagggagaataatcgtgactgcaagttattccaattatttaaagtcttttcacctttttggttacttaaagagatttaagtcggaaagacaatccgttatcaatattaaacaagtgtatgcttaggcataaatttgggtggtaccacggaaatgactttcgtcccttattttttaagaggatgaaagtctttttttagttaaacaacaaatatgataaatagaaaatgaatagttcgaatagggaggtcagtgacatatgtctgaacaacaaacaatgtcagagttaaaacaacaagcgcttgtagatattaatgaagcaaatgatgaacgtgcactgcaagaagttaaagtgaaatacttaggtaaaaaagggtcagttagcggactaatgaaattgatgaaggatttgccgaatgaagataaacctgcgtttggtcaaaaagtgaatgaattgcgtcaaacaattcaaaatgaattagatgaaagacaacagatgttagttaaagaaaaattaaataagcaattggctgaagaaacaattgatgtatcattaccaggtcgtcatattgaaatcggttcaaagcatccattaacacgtacaatagaagaaattgaagacttattcttaggtttaggttatgaaattgtgaatggatatgaagttgaacaagatcattataacttcgaaatgctgaatttacctaaatcacaccctgcacgtgatatgcaagatagtttctatattacggatgaaattttattacgtacgcatacatcaccagtgcaggcacgtacgatggaatcacgtcatggtcaaggtccagttaaaattatttgccctggtaaagtgtatcgtcgtgactctgatgatgcgacacatagtcatcaatttacacaaatcgaaggattagttgttgataaaaacgttaaaatgagtgatttgaaaggtactttagaattgttagctaagaaattatttggtgctgatcgtgaaattcgtttacgtccaagttacttcccattcactgaaccttctgtagaagttgatgtgtcatgttttaaatgtaaaggaaaaggttgtaatgtgtgtaaacacacaggatggattgaaattttaggtgctggaatggtacatcctaatgtattagaaatggctggttttgattcttcagagtactctggatttgcatttggtatgggaccagaccgtattgcaatgttgaaatatggtatagaagatattcgtcatttctatactaatgatgtgagatttttagatcaatttaaagcggtagaagatagaggtgacatgtaatgttgatatcaaatgaatggttgaaagaatatgtaacaatcgatgattctgtaagtaatttggcagaacgtattacgcgcacaggtattgaagtggatgatttaattgactacacaaaagatatcaaaaatttagttgtcggcttcgttaagtcaaaagagaaacatcctgatgctgataaattaaatgtttgccaagttgatatcggagaagacgaacctgtacaaatcgtttgtggtgcaccgaacgttgatgcaggacaatatgtcattgttgctaaagtaggtggcagattgcctggtggtattaaaattaagcgtgccaaattacgcggtgaacgttcagaaggtatgatttgttcgttacaagaaattggtatttcaagtaactatataccgaaaagttttgaatcaggcatttatgtatttagtgaagcccaagttccaggaacagatgccttacaagctttatatttagatgatcaagtaatggaatttgatttaacgccgaatcgtgcagatgctttaagtatgataggtactgcttatgaagttgcagcattatataatacaaaaatgactaagccagagacaacatcaaatgagcttgatttatctgcaaatgatgaactgactgtgacaattgaaaatgaagataaagtaccatattatagtgcacgtgttgttcacgacgtgacaattgaaccctcgccaatttggatgcaagcacgcttaataaaagcgggtatacgtcctattaataatgttgttgacatttcaaattatgtgttattagaatacggtcaaccattgcacatgtttgatcaagatgcgattggttcacaacaaattgttgttcgtcaagctaatgaaggcgaaaaaatgacaacattagatgatacagaacgtgaattattaacgagcgatattgtcattactaatggacaaactccaattgcattagctggtgttatgggtggcgatttttcagaagttaaagaacaaacatcaaatatagtgattgaaggtgctatttttgatccagtttcaattcgtcatacatcaagacgtttaaatttacgcagtgaatcatctagtcgttttgaaaaaggaatagctactgaatttgtagatgaagcagtcgaccgtgcatgttatttattacaaacttatgcaaacggaaaagtgctaaaagatagagtgtcttcaggagaacttggtgcatttattacaccaatcgacatcactgctgataaaattaatcgcactattggatttgatttgtcacaaaatgatattgttactatttttaatcaactagggtttgatacagaaataaatgatgatgttattacagtgctagtaccatcacgtcgtaaagatattacaattaaagaagatttaattgaagaagttgcacgtatatatggatacgacgatattccatcaacgttacctgtcttcgataaagttactagtggtcagctaactgatcgccaatataaaactagaatggttaaagaagtgttagaaggtgctggattagaccaagctattacgtattcgttagtttctaaagaagatgctactgcattttcgatgcaacagcgtcaaacaattgatttattgatgccaatgagtgaagcgcatgcgtcattacgtcaaagtttattaccacatttaatcgaagcggcatcatataatgtggcacgcaaaaataaagatgtaaaattatttgaaatcggcaatgtcttctttgctaatggagaaggtgaactaccagatcaagttgaatatttaagtggtattttaactggagattatgtagtcaatcaatggcaaggtaagaaagaaacggttgatttctatttagcaaaaggtgtcgtggatcgagtatctgaaaagttaaatcttgaatttagttatcgccgtgctgatattgatggattacatccaggtcgtactgctgaaatcttattagagaataaagttgttggttttattggtgaattacatccaatattagcagctgataatgatttaaaacgtacgtatgtttttgagttgaattttgatgcattaatggctgtgtcggtaggttacattaattaccagccaattccgagattcccaggcatgtctcgtgacattgcattagaagtagatcaaaatattccagcagctgatttattatcaacgattcatgcacatggtggcaatatattaaaagatacacttgtctttgatgtatatcagggcgaacatttagaaaaaggtaaaaaatcaattgcaatacgtttaaattatttagacacagaagaaacattgacagatgagcgcgtttcaaaagtacaagcggaaattgaagcagcattaattgaacaaggtgctgttattagataatgatttaaaccccatgtataaggatatctgaagtagattgatatccctaacatggggttttatttttgggttcaccaatttggttccaatgcatttaaaaagtcaaagaggaacagcggaatacagatgatgcttcgcacaactgcataaaagcctctaatgattaaaaatcaaagaggctttaaaattttttgggctttttcacgatttttaaaatgcttttttgaaatggtatctaaacgtgaaagaccgtatttttttataattttggcggcgattacatcgactttagcaccggcacctttaggaatcgtcatattaatattttttgatatttgatccatatatgtaacaaatgcgtatcgagaaattatgcttgccactgcaatggctaatgacttcgattctccttttgtttcaaattttgttttctttggaagtggtatatctgataatgcgtaatggctatacacttcgcgttttgcgaactgatcaatgacgatatagtctaattgagacgaatcaattttttcaagtacatttttgatggcttcattatgaagggcagctttcatttttacttgagtccagccttttgcttgctgaatattatatttttcattgtgtagtgttaataatgaatgtggtatgaaagtaaccaattgctcagcaagttctacaattttggtatcggttaatttttttgaatcatctacacccaaagtttttaaaatagggacatgctctttggtaacgaaagcagcacacacagtcaacggaccaaagtaatcgccacttccagcctcatcactaccaatacagttaaattgatcatacattaaagtttgttcaagaaaagaattagccatatttttctttttagttttattagtattcaattgagaatgctgcggtagaagttcttcagacacagcttctgcatgattaccttgaaacatgactttacctgattggtaaatatttacagttgtattttgatactttgcacgtgctttcataccttgaggtaaattctcagtatcaaaagaaatgcgtgacattaatgtcgttatgtctttatccgacaatttaaaaacgatattcgccatttgtgtaaatcctttcataaaatttcattgtctttagcaaaaataatcatatcataaatgataataacgtcagaaacatttatgtatgttgtaaagaattaattgcggatacttacaaaatacatagtggtcatgtataatgtttatgaaaatgttatagtgacacaatttaaacatgataaagtattgaatagaaaattctttacattatttcattataaaaagaacattaagtcatctatagagattgtgttgttgttttatcataattgcaatataacaatattagtatcaaattcagacaaactatccagtcatattttataacgtgaatttagattttaaaaaaaggatcaggagaaattataaatgacacagtttaaaaacaaggtaaatgtatcaattaatgatcagctttttacaattgttggggaagataacccagagcacatacgatatgtagcacatttagttgatgataaaataaaagaattagggtataaagcagcaggtttagatacttcaagaaaagcaatactaactgctgtgaatattatgcatgaaaaagtactactagaagaaaaaaaatcgacgtttgaaacaacaaattcacaaattgcagcagcgtgagcaataaatggtcattgattttatcataatcattttctttgtgtattttgtcatcgttggattcagacgaggtttttggttatctatgatacatttgagtgcaacgattgtatcattgtggattgccagtcaattttacaaatctattgtagaaagattaattgtatttattccatatcctaaaacaacagcatttaatacaacttttgcgtttcattttaatcatctacaaaatcgatttgaagcgattgtagcttttttaatgattacattgttttgtaagttcattttatatctaattatcgtaacttttgataaaataatagcgtatcaaaacattcatattttcagtcgtgcaatgggaatgatagttggtgtgtttatgacgataattgtcttacactttacgttatatctattggcattatatcctaacgaagcattacaacatcagcttaaaatatctattgtgagtcattcattgatttttcacatcccatatttatcggctttcaccattaatttataaattatcataagaggtcaggacaaaggtatatattaatgatacgtcctggtcttctttttatggagtgttattatgacaaaaaaagatgttatcaaactattagaacaaattgctacttatatggaattaaaaggggaaaatacttttaaaatatcagcgtatcgaaaagcagctcaaagtcttgaattagatgaacgaccattagatgaaatatctgatgtaacggagttaaaaggcattggtaaaggtgttgcagaagtaatcaatgattaccgtgagaccggtgaatctcagtatttacagcaattacaggaagaagttccggaaggtcttattccacttttgaaaattcaaggacttggaagcaagaaaattgctaagctatataaagagttgaatattgttgataaagcgtcacttcaagttgcttgtgaaaatggaaaagttagtgaattaagcggatttgctaagaaaacggaacaaaacatattagaagctgtgaaacaacttggtgctaagaaagatagatatccaattgatcaaatgagaagacttaatcaagaaatcattgattatatagatacattaaattatatcgatcaatattcatctgcaggaagcttccgtcgttttaaagaaatgagcaaagatttagatttcataataagtaccgataacccaaaagcagtgcagcagcaattattaaatattcccaataaagtaaaagaagttgcagtggggaacacaaaagtttcattagaattagcgtatgatgatgaaacgattggtgtcgattttcgattaattgaaccaagtgctttttatcatacattgcagcattttactgggtcaaaagaacataatataagaattcgacaacttgctaaagcacgtgatgaaaaagtaagtgaatatggaattgaacaagctgatggtacattaattcaatatgatagtgaagccaagatatatgaacattttaatgtgaattttataccacctgctatgcgagaagatggtagcgaatttgataaagatctaagtaatatcattacaatagatgatattaatggtgatattcatatgcatacaacgtatagtgatggtgcgttttctattcgagacatggtagaagcaaatatcgcaaaaggttataaattcatggtaattactgatcattcacaaagtttacgtgttgctaatggcttacaagtagaaagacttttaagacaaaacgaagaaattaaggctttagataaagaatatagtgaaattgatatttattcaggtacagaaatggatatattacctgatggctcgctggattatgatgatgaaattttagcacaacttgattatgtaattggagctattcatcaaagctttaaccaatcagaagaacaaattatggaacgattagctaatgcatgtcgcaatccatacgtgcgacatatagcgcatccaacagggcgtattataggtagaagagatggttataaaccgaatattgaacaattaatggcattagctgaagaaacgaatacagtattagaaattaatgccaatccacatcgactggatctgagcgctgatatcgttcgtaaatatccaaatgtgaaattaactattaacactgatgcgcatcatacaaatcatttagattttatgaattatggcgtagcaactgcgcaaaaaggatttgtaacaaaagatagagtgattaacgcattatcgcgtgaagcttttaaagactttattgaaaataatacaaaacttaagaaatagagggattttatgagacaaaaaacattagacgtcttagaatttgaaaaaataaaatcactcgttgccaatgaaactattagtgacttaggcttggaaaaggtcaatcaaatgatgccagctactaattttgaaacggttgtttttcaaatggaagaaacggatgagattgctcaaatctataataagcatcgtttaccaagcttgagtggcttatctaaagtatcagcattcattcatcgcgctgatattggcggcgttttaaatgtatcagagcttaacttgataaaaagattaattcaagtacaaaatcaattcaagacattttataatcaattggttgaagaagatgaaggtgttaaatacccaatattagatgacaagatgaatcaattacctgtgttaactgatctttttcaacaaataaatgaaacatgcgatacgtatgatttatatgataatgcgagttatgaattgcaagggattagaagtaaaatttctagcacgaatcaacgtattagacaaaatttggaccgtattgttaaaagccaagcaaatcagaaaaaattatcagatgctattgtaacagttaggaatgaaagaaacgttatacctgtcaaagctgaatatcgacaagattttaatgggattgtacatgatcaatctgcttcaggacaaacattgtatattgagccatcatcagttgttgaaatgaataatcaaattagtcgattacgtcatgacgaagcaattgaaaaagaacgcattttaacgcaactaactggttatgtggctgcggacaaagatgcactacttgtggcagaacaagtcatgggtcagttagattttttaatcgcaaaagcgagatatagtagaagtattaaaggaacaaagccgatatttaaagaggaccgtactgtatatttacctaaagcataccatccattattaaatcgtgagactgttgtagctaataccatcgaatttatggaagatattgaaacggtaattattacaggaccgaatacaggtggtaaaactgtaacattaaaaacattaggtttaattattgttatggctcaatcaggattgttgattcccacacttgatggtagtcagttaagtgtatttaaaaatgtatattgcgatatcggagatgaacaatcaatagaacaatcattatcaactttttcatctcatatgacgaatatagttgaaattttaaagcatgcagacaaacatagtttagttttatttgatgaattaggtgcaggtacagatccgagtgaaggtgctgcattagcaatgagcattttagatcatgttagaaaaattggttctctagtaatggcaacgacgcactatcctgaacttaaagcatatagttataatcgagaaggcgttatgaatgcgagtgtagaatttgatgtagatactttgagtccaacgtataagttattaatgggtgtgccgggtcgttcaaatgcttttgacatttctaaaaagttaggtcttagtttgaatattattaataaggctaagacgatgattggtactgatgaaaaagaaataaatgaaatgattgaatcattagagcgtaattacaaacgtgtagagacacagaggttagaactggaccgtcttgtaaaagaagcggagcaagtgcatgatgatttatctaagcagtatcaacaattccaaaattatgaaaagtctctaatagaggaagcgaaagaaaaagcaaatcagaagattaaggctgcaacaaaagaagctgacgatattattaaagacttaagacaattgcgtgaacaaaaaggtgcagatgttaaagaacatgaattgattgataagaagaaacgattagatgatcattatgaagcgaaatctataaagcaaaatgtacaaaagcaaaaatacgataaaattgttgctggtgatgaagtaaaagtattatcttacggtcaaaagggtgaagttttagaaattgtcaatgatgaagaagcaattgttcaaatgggaattattaaaatgaagttacctattgaagatttagagaaaaaacaaaaagaaaaagttaagccaacgaaaatggttacacgtcaaaatcgtcaaacaattaaaactgaacttgacttacgaggctatcgttatgaggatgctttaattgaactagatcaatatttagatcaagccgttttaagtaattacgaacaagtttatatcattcatggtaaaggtacaggtgcacttcaaaaaggtgtacaacaacatttgaaaaagcataaaagtgttagtgactttagaggtggtatgccaagcgaaggtggatttggcgttaccgttgcaacactaaaataaattataatttgataaattaaatagctgcagttaaaataatgtaaagcaacaagaatacatttcaaacatgttatttgaaataagcataaaaattgagcaaatagaaatacatgaagcatgttatctgatataatttgaacatcataataataattaaggaggattggcatttatggcaatcgtaaaagtaacagatgcagattttgattcaaaagtagaatctggtgtacaactagtagatttttgggcaacatggtgtggtccatgtaaaatgatcgctccggtattagaagaattagcagctgactatgaaggtaaagctgacattttaaaattagatgttgatgaaaatccatcaactgcagctaaatatgaagtgatgagtattccaacattaatcgtctttaaagacggtcaaccagttgataaagttgttggtttccaaccaaaagaaaacttagctgaagttttagataaacatttataagttacaaccaatgacgactggggcatttctttaatgaattgctccagtttttgtttgtgtttttaatataaaaagttgaatgataagtcatcatattgtttacgacttgagaatggtgggattaataaatctatgaacgttaaatgataatctagcatgctgatagatttgtagcagttggtttgataaaaccatgttcaatattacatgatgtgcatgaaaagtcatactcgaagatgttgattattaactagaattagtggtgataaatttgaagcacttttgtagcatcattcattttaaaattagaaggggggatatttttggaagactataagcaacgaattaaaaataaattaaatgtcgtacctatggaaccaggatgctatttaatgaaagatcgtaatgatcaagtgatatatgttggcaaagctaaaaagctaagaaatcgattgcgatcatattttacgggtgctcatgatgctaaaacaacgagactggttggtgaaatacgtcgctttgagtttattgtcacgtcaagtgaaacagaatcacttttactggaattgaatctgattaaacaatatcaaccaagatataatatattattaaaggatgataaaagttatccatttattaaaattacgaaggagaaatatcctagactactagtgacgagaactgtaaaacaaggtactggcaaatatttcggaccgtatccgaatgcatattctgctcaagaaactaaaaagttattagacagaatatatccatatcgcaaatgtgataagatgccagataaattatgtctttattaccatattggacaatgtttaggaccatgtgtatatgacgttgatttgagtaaatacgcacaaatgacgaaggaaattactgattttctgaatggggaagacaaaacaattttaaaaagtttagaagagcgaatgttaactgcaagtgaatcacttgattttgaacgggctaaagaatatagagatttaattcaacatattcaaaatctgacaaacaaacaaaaaattatgtcatcagataaaacgattcgtgatgtctttggttatagtgttgataaaggatggatgtgtatccaagttttctttatacgacaaggtaatatgataaagcgagatacaacgatgattccattacagcaaacagaagaagaagaattttatacatttattggacaattttatagcttaaaccaacatattttacctaaggaagttcatgtaccacgtaatttggataaagaaatgattcaatctgttgtggacactaaaatcgttcaatccgcgcgaggtcccaaaaaagatatggttgacctagctgcacataacgctaaagtatccttaaataataaatttgaattaatatcacgtgatgagtccagaacgattaaagctattgaagaacttggaacacaaatgggaattcaaacaccaattagaattgaagcattcgataattctaatattcaaggtgtggatccagtgtcagcaatggttacatttgtcgacggtaaaccagataagaaaaattatagaaagtataaaatcaaaacggttaaaggtccagatgattacaaatcaatgagagaagtagtaagacgacgatattctcgcgttttaaacgaaggattaccattacctgatttaataatagtagatggtggtaaaggacatatgaacggggttattgatgtgctacaaaacgaattaggtcttgatatccctgttgcaggtttgcagaaaaatgataaacaccaaacatctgaattattatatggcgctagtgcagaaattgtaccactgaagaaaaatagccaggcattttatttgttgcaccgtatccaagatgaggttcacagattcgcaatcacatttcatagacaaacacgtcaaaagacaggcttgaaatcaatacttgatgatatagatggtatcggtaacaaacgtaaaacattattattgcgttcattcggttcaatcaagaaaatgaaggaagctacacttgaagattttaaaaatataggtattcctgaaaacgtcgcaaagaacctacatgaacaattgcataaataaattactgggcgtgagaatcattctcatgccccaaaatatatgaaataatgttacaatatggttaacaaagttatttttttgaatgtacgtggaagcgttttctaaatgagaaagtttatcatcacaagcaattttaaatatcgaatccaaatgttacattgttcgacatgcagtttggtgatcgtgcagtgtgtatttgtctttaaaatgtttcgcttaatgataatgacaacgctagaaacgatatcactttagggggttaagcgtacgtttaatataaatagctcaataaattaaatattcgttcacaggggggactccttttggctcaatcaaaaaatgaattttatctaagacgtattcactcgttattaggtattatcccaataggtgcatttttggtcgttcatttattagtgaatcaccaagcaacacaaggtgctgaagcgtttaataaggcatctaactttatggaatcattaccatttctaattattgtagaatttttatttatatacattccgttgttatatcacggtttgtttggtatacacattgcatttacagcaaaagaaaatgttggacattactcgatttttagaaactggatgttcttcttccaaagagtgagtggtatcttaacatttatctttattggtatccatttatggcaaacacgtttacaaaaagcattttacggcaaagaagtgaattacgatttaatgcacgaaacattgcaacatcctggatgggcaatattttatattatttgtattattgctgttgtgttccactttgcaaatggcttatggtcattcttagttacttggggtggacttcaatctccaaaatcacaacgagtatttacatgggtttcattaatcgtatttttagttatttcgtatattggtgttactgcaattattgcctttatgtaatacatcgcatttaacaaatatagattgaaaatttaggggagtgaaatttttatggcagagaaacatcttattgttgtcggaggtggcctagcgggcttaatgtcaacaattaaagcggcagaaaaaggtgcacatgtagatttgttctcagttgtaccagtaaagcgttcgcactctgtttgtgcccaaggtggcattaatggtgcggtcaatactaaaggggaaggcgattctccttggattcactttgatgatacagtgtatggtggcgatttccttgcaaaccaaccacctgttaaagcgatgacagaggcagcacctaaaattattcatttattagaccgtatgggcgtaatgttcaatagaacaaatgaaggtctattagattttagacgtttcggtggtacattacatcacagaacagcatatgcaggggcaacaactggacaacaattattatatgcattggatgaacaagttcgtgcatatgaagtagatggattagttacgaagtatgaaggatgggaattccttggcatagttaaaggtgacgatgatagtgcaagaggtatcgttgcacaaaatatgacaactgctgagattgaaacatttggttcagatgcagttattatggcaacgggtggccctggtattattttcggtaaaacaacaaactcaatgattaatacaggatcagcggcttccattgtttaccaacaaggcgctatttatgctaatggtgagttcattcaaattcatcctactgcaatccctggtgatgataaactgcgactaatgagtgaatcagcacgtggtgaaggtggacgaatttggacatataaagatggtaagccttggtacttcttagaagagaaatatcctgattatggtaacttagtacctcgtgatatcgcaacgcgtgaaattttcgatgtatgtattaaccaaaaattaggtataaatggcgaaaacatggtatatcttgatttgtcacataaagatccacatgagttagatgtaaaactaggtggtatcattgagatttatgaaaaattcactggtgatgacccacgcaaagtaccaatgaagattttcccagctgttcactattcaatgggtggtctatatgtagattatgatcaaatgacaaatattaaagggttatttgcagctggagaatgtgacttctctcaacatggtggtaaccgcttaggtgccaattcattgttatcagcgatttatggtggtacagtagcaggtccaaacgcgattgattatatttcaaatattgatcgatcatatactgatatggacgaaagtatttttgaaaagcgtaaagctgaagagcaagaacgttttgataaattattagctatgcgcggtacagaaaatgcatataaattacaccgtgaacttggtgaaattatgacagcaaatgtaactgttgttcgtgaaaatgaaaaactgttagaaacagataaaaagattgttgaattgatgaaacgttatgaagatattgatatggaagatactcaaacttggagtaaccaagcggtattctttacccgtcaactatggaacatgttagtacttgcacgtgttattacgattggtgcatataaccgtaacgaatcacgcggtgcccattataaaccagaattcccagagcgtaatgatgaagagtggttaaaaacgacaatggcctcattccaaggcgcatttgaaaaaccgcagtttacttatgatgacgtcgatgtgagtttaataccacctcgtaaacgtgattacacaagtaagtctaaagggggtaaaaaataatgactgaacaatcagtgaaaaacactccacaacatgaaacacaatctaaaccgaaacaaaaaacagtaaaattaattattaaacgacaagatacaagtgattctaagccttatgaagaaacatttgaaattccatatcgtgaaaatttaaacgtcattgcttgtttaatggaaattagacgtaacccagttaatattaaaggtgaaaaaacaacacctgttgtctgggatatgaactgcttagaagaagtatgtggagcatgttctatggttatcaatggtcgtgcaagacaatcttgttctgcgattgttgatcaattagaacaacctattcgtttagagccaatgaatactttcccagttatccgtgacttacaagttgatcgttctagaatgttcgataacttaaaacgtatgaaagcatggatcccaattgatggaacgtatgatttaggtccgggaccacgtatgccagagaaaaaacgtcaaacagcttatgaattatctaaatgtatgacatgtggtgtatgtttagaggtttgtcctaatgttactgaaaataataaattcgttggtgcacaagcaatctcgcaagttcgtttgtttaatttgcacccaacaggatctatgactaaagatgaacgtttaaatgcattaatgggtactggtggcttacagcagtgtggtaattcacaaaactgtgttaatgcttgccctaaaggtattccattaacaacatccattgcagcaatgaacagagaaacaacattccacatgtttaaatcattctttggttcagaccatgaagtagaataaaaattaatcccttttgagttaaaatgttatgttcctttcaaaattaaattgaatggagatacacaataacttggaagggatttttttaataagcagattacatgacaatatgatagtgggctgatttaaaataaatattataatgacaaaaatggtaaacacagtgcataatactaaaatccaatgcttagttatgataaactaaaaattaaattaaaagtaaggatgaccgaatatgaataaaccaataggtgtaatagactctggtgtcggaggtttgacagtagctaaagaaattatgcgtcagttgccaaatgagacgatttattacttaggtgatattggacgatgtccatatgggccaagaccaggagaacaagtaaaacaatatacagttgaaatcgctcgtaaattaatggaatttgatataaaaatgctcgtgattgcttgtaatacagcaactgctgtagctttagaatatttacaaaagaccttatcaatcccagtgattggcgtaattgaaccaggtgctagaacagcaataatgactactagaaatcaaaatgtattagtactaggaacggaaggcacaattaaatctgaagcatatcgtacgcatattaaacgtatcaatccacatgtagaggtacatggcgttgcctgtccaggttttgtgccacttgtagaacaaatgagatatagtgatccaacaattacaagcattgtcattcatcaaacactgaaacgttggcgtaatagtgagtctgatactgtcattttaggatgtacccactatccattgctctataaacctatctatgattattttggtggtaaaaagacagtgatttcgtctggattagaaacggctcgtgaagttagtgcattgctaacatttagtaatgaacatgcaagttatactgaacatccagatcatcgattttttgcaacaggtgatcctactcacattactaacattatcaaagagtggttaaatttatctgtcaatgtggaacgtatatcagtgaatgactaggaggatttttaatgaaagagattgttattgcatcgaataatcaagggaaaataaatgactttaaagtaatatttccagattaccacgtaataggtatttcagaactaataccagattttgatgtggaagaaacaggatcaacatttgaagaaaatgctatattaaaatcagaagctgctgcaaaagcattgaataaaacggtcatagctgatgacagtggactagaagtttttgcattaaatggtgagccaggtatatactctgcacgttatgctggtgaaaataaaagcgatgaagcaaatattgaaaaattattaaataagcttggtaatacaactgatcgtcgtgcgcaatttgtttgtgtcataagtatgagtggccctgatatggaaacaaaagtatttaaaggtactgtttcaggtgaaattgcagatggaaaatatggcgaaaatggtttcggatatgatccgatattttatgtaccgaaattagataaaaccatggctcaactttcaaaagaacaaaaagggcaaattagtcatagacgaaatgcgattaatttacttcaagcttttcttgaaggtgataaaaatgtctaaatggattattgtgagtgataaccatactgaatcaggcgttttatatcaaatttatgaaatgcacccagatgcagatgtatatttacatttaggagattcagaattcgcgtatgatgatacggaacttagcttatttaatagagtaaaaggcaattgtgatttttacccagaatttgaaaatgaagcggtcgcaaaatataatgacgtgaaagcattttatactcatggacatttatatcaagtcaatcgaacaagagatttattagctgaaaaaggacttgaattaggttgtttgtttgcattttatggacatacacatgtggcaaaatatgagtatattaatggtgttcatgttattaatcctggaagtatatctcaatctagaagttcaatggaagaaacatatgctgaagttattattgatgatcaaactttacatggcaccatcaatttcaaaaatcgacatcacgaaacaatcagtcatactactttttaaatagaagtagctatggctttttttagtttatagactgatttaactaggaggtcgtgtcatcaatgtttgtttaaaagtatttctgacaattttataagataattggaatgaataacacatttatgttatgaaaagaattgtaattttggagaatgtgattgttgataaccctatatggttgaatcatgttgattatttggttaaaagtgtattattaaaaagtataaaattaagattccaagaagtcaggaaatttgaaattttagttaaaatcatgaatcgtatacatatttaaaaggatttctaaagtcataaattatatcaataatttgatggttaaaatatggagtagcaaaattcttgaaattcagaaatgtagtgacacaaatattaatgtttagttaataaatagttaatgtagttttttgtatctgtctattattataaatatatacaaaataaatatttgaggataggtgttattaattatgaaaaagaattttattgggaaatcaattttaagcatagctgctattagtttaacggtatcaacgtttgccggtgaatctcatgcacaaactaaaaacgttgaagctgctaaaaaatatgatcagtatcaaacaaactttaaaaaacaagtaaataaaaaagttgtggatgcacaaaaagctgtaaactttttcaaacgtacaagaactgttgcaacacaccgtaaagcacaaagagctgttaatttaattcatttccaacacagttatgaaaagaaaaaattacaaagacaaatcgatctagttttaaaatataatactttaaaataattgatagaagccatgctatagagtgtggctttttgctatatccaaaggtataattattttataatattgtgtttatttgaatggtgagcttattgggataaataatataaataattacttaaaagtgaatgcaatagttgtttatgttttgaacaagcgaggtggctattgtgaaaaggaaatcgaatgtattaacaatcataaaaattgtaacggatatagtggcaaccgtgttaatcatacgtgctttattaaacagtcgtaaagatgctaaataaattggaagttacttaaaataaaaaagcacgccaatacgttagcattgttttctaacgtttggcgtacaactatttaattcagtatgttttttaataccaagtaatcgagtcgatttcaccgtttttaacaactttaatattttttctgttctcttctaaaggacgagttaagtcaaaagtatagtaatctctaggaccaccatctttaattctgacaactgctttcttcacatcaccttggcttaattttttaacaataaggtacagatcattaacagtttcagctttgtaaggagttagatttttatcagactctttcattaacttatcaatacgttcatcgtcctttttagcttgatctgctaaattttttgcgatttctaaacctttccattcataactaaagaaagctttagcatcattagtttgagttaaaagacctgcagcgattactgtagatgcgataatagtttttgtgatattttttttcataataagttctccctgtaaaataaatttgtacttactaatgcgagtacactgctattttacaaacggtttcatacatttaccagttaacacttcattaattaaaattaagtgcaaattaataaggtttaatgcaatcgaaaaagaataatgatgaatttgatggtattatttttatttgaggtattattgaatttgttgatagtataataatagtagtaaacgtcactcaactatgattgaataatttttattgctaaaacgatatttacatttctctacattttgtttgctaagttggatagacaaacactccaaattgttatacatatagctgttttgatatatattttttataaaacaaagaaatgattcatagtagagaagtaattaatatgtataattttacttataaagaaataagagatatattctaattatggttgatatgttatgattaatatataagttaaaaattatactatttaattgaattatgcattttcgaagtaaacataattcaacacttacatttttaaatagataaaatagtgtaaaatcacgtgccaagattactatagagtaggcattgagtattattggcaatcacttaagtgattgttatttttcgtggtcaataataaagatataaataaatatattgaggtcaaacgatgataattaaaattttaacaattctattactactttgtatattgagctatttggttacaaatagaaagaagccttttctgttcttaaagacactctttatgggtgtggtatttatctttataggatatatttcactggcaatatctgccgtaattatttatggtattattcaatttatcacaattgattttggtagttttttcttaatgggtattatattgatcttgatttcaagtatattccaattatttatagttagattactttttagaaaaaagaatgtcgatttgacagaggttgtcgttttagagcatttaattcaatggttcttagtttactttgcgatctatcaagcagtaaatgaaaaaatggacattaatgatattaatatcgacaatttccaatctgtcttttttgacgtgtctaatttgaatttagtaattctaccaacgttaatcattagctgggtcacaatatttaactatagaatgagaagttacaaataaaatctatgagattataccttcagacaccaacattcaaatggtgtcttttttgttgtgtggttttatttttgaaattcgaaaaagtagaggcatgaattttttgactagtgtataagtgctgatgagtcacaagatagatagctatattttgtctatattataaagtgtttatagttaattaataattagttaatttcaaaagttgtataaataggataacttaataaatgtaagataataatttggaggataattaacatgaaaaataaattgatagcaaaatctttattaacattagcggcaataggtattactacaactacaattgcgtcaacagcagatgcgagcgaaggatacggtccaagagaaaagaaaccagtgagtattaatcacaatatcgtagagtacaatgatggtacttttaaatatcaatctagaccaaaatttaactcaacacctaaatatattaaattcaaacatgactataatattttagaatttaacgatggtacattcgaatatggtgcacgtccacaatttaataaaccagcagcgaaaactgatgcaactattaaaaaagaacaaaaattgattcaagctcaaaatcttgtgagagaatttgaaaaaacacatactgtcagtgcacacagaaaagcacaaaaggcagtcaacttagtttcgtttgaatacaaagtgaagaaaatggtcttacaagagcgaattgataatgtattaaaacaaggattagttaaataaaacttcaatcgttgctgttatctggaaataattaattaaatgttatgttaatttttgttaatgaaaaaagtaatctatttaatgacaggttaatgtaattgtcctgaaattgactatatactcagtaagtatcaattttaaggagagcttataatgaaatttaaaaaatatatattaacaggaacattagcattacttttatcatcaactgggatagcaactatagaagggaataaagcagatgcaagtagtctggacaaatatttaactgaaagtcagtttcatgataaacgcatagcagaagaattaagaactttacttaacaaatcgaatgtatatgcattagctgcaggaagcttaaatccatattataaacgtacgattatgatgaatgaatatagagctaaagcggcacttaagaaaaatgatttcgtatcaatggctgatgctaaagttgcattagaaaaaatatacaaagaaattgatgaaattataaatagataataaataaaacaggttgagacaaaaaatggtcttaacctgttttcaatttgcatatgtgataaattctatatcaaaatgcttatgtataatgaatgacatttaaaagtaggggagacaaatataaatacaatagttcctaggattactctcaaaataactatatcaattatttactttgctctcctattttttaaaatatgtacatgtttaaacaatcaaaagtgtacaatattaaattatcatttccagttctagtgctatattggtagtagttgactaaatgaaaataagcttataacaagttttttcaatactcgtggggccacaacagagagaaataggatcaccaattccaacagacaatgcaagttggcggggccccaacatagagaaattggatcaccaatttcaacagacaatgcaagttggggtggggcccaacacagaagctggcgaaaagtcagcatacaaaaatgtgcaagttggcggggccacaacagagagaaataggatcaccaattccaacaaacaatgcaagttggcgggggccccaacatagaagctggcgaaaagtcagcttacaaaaatgtgcaagttggcggggccccaacatagagaaattggaaccccaatttctacagacaatgcaagttggggtaggacatcgataaagaaatactttttctttagcaattagtatttcttatgcatgagctttactcatgtattcattttttaagtacacattagctacagctaatgataaagaaccactacataataaatcattagtggttctttatcatttctatctcactcttttactggaagaaaaagtttacgtttgtagaacatgccacaataccaaaaataattaagaaaaataagacgataagcatgatgacacttttcaaacaacctctatcagtttctttcgattttctttgttgaacctttttataatcttcaagtagttttgcggcttttttatttatatgtttattcatgatgttgactccttataatatatgtttaattcattaaaatagttgaaaacatgacttgaaataaagatataaagctaaagtaaggatgttcaattgtttcaaattttatgaaagtataacgttaaatatgttaatttgatgatgatatttgctttttattttccaaatggaatttacttaaactgatgcattaaaatattaatgaagcactagaatacataaatgaatagtaatggtgcacagtatagaataattaaggctatattaagtataaatatcgttaactgtaagctatctttagttttaatataaactattaggataatcgacgtaagaagaatcatatatattaatgatgaagaagtccatacaaaatccgcatcatttgttgttaataatgggactataattaatccgaaattaatcatgcatgctatatatactataatgttatacacaatgttaatttttgttcaccaccttatacttctattttaaaaacttctttataatgatatattgtttaatgttgaaataattagattatctaattttcatttgctttacatgtaaaaggctatatatagtatgctctttatgattctaaatgctttttaatatttaatgctcatcaacatttggattttgaatattcaattcaaaaactttattagctacgtcaattgtaaaatcagaaccatagttgacatgagctacttttaattttccatctaaataatagattgcgattgcaacatcgtaaaattcgtcaatgacaaataaactcttttcgtttgttacaacctcatgctctcctgagtatacaacgttaatttcccaatcattaaaaaccatttgttaacctccttgaacatttaaattgattcaacttaagtttaacttattcatacaacttcgtacaatatctagatgaacattaattgtatttctagaaatctttttcaattatatgtactaattatacttttaaatttcttatttcagtatagttttaaaacgattttaaaataattctgcaaatatattaacacataatgtgttcaaaaagttttgaacaatttcaaaacttttatataaagggtttgacaacatggaattcaaatttcttattttaaaaattacctcatatagtgtcatgtttagtctaatttttaagtcaggaaagcaaatcaagtagatagtttaaattaaaaatatcataagttaattaaactaaattcagtataaaaattagccgaaaaacatcatttctgaagttatcggctaaagttataaattatatttatttgtacatgaacaaataatttacattaatttgtcatttcttctttttcccaatcgattttatatctttctgaagaacgatctatccatttatctttagtattggtacctttccaatttgttgaagtccagtgcaattggtagtcatcacgaactcgttcgtatattacatctatatttgtttgttgtttggatgcttttctatccatagtaataactgtagcgaagtctggtgaaaaccctgaagataatagagaacttgctttgttaggatcaaggaagttatctgctgctttcatagagccatttctagttttcatgaaaagttgattgccatataccgggttccaagaatctctatcatatggtccccaattttgattcaccatattgttaaatatcactttccagcctacttttttatcagttgggctctctaaaattgttttgaaatcaggttgaacatatttcagtgtatgaccaatcgaaacatttgcaccaataaggccgccaatttttcctgtatcatcaccagtaacattaccgttgaatccataagttaaagtactcatatactcttttgtatcaatcgaatttcttggatagtaatcagatatttgagctacttcattatcaggtagttgcaactgtaccttaaaggctgaaggccaggctaaaccacttttgttagcaccttcttcgctataaactctatattgaccagcaatggtacctttcgttctaataactagcagttttttattatgatttttatcatcgataaaactataaaatacttttttgtgcatgccattttctttatcataagtgactaaatcacctgtttttactgtagtattgcttccaatatctgtagtaccggttttaatattaatatcagaatctgcggcattagcgacaggattcattaatatggaacctagcaatagtgttgttgttactgagctgactatacgtgttttcattttcatcatccttctattttttaaaacgatttgaggaaacaataatcaatatgtcaatttagaatattgcagttgagacatatcaaatatttataatcgtttatattagtatatttaatgtagcaactgataaattactgagtgatgatgagtgattattttaagaatatgtttttaacttttatttaaaatttgaaaggaagcatttcaatttcgagggttagtcaaagttgaataaattctttatgaaacaaggaaaagacatagctaattttattgattaatttctttaaaactaatgatttgtttgatttaaaaatgtaatcgattacaatataaaaatacaaatatcttagaattaaatcaattaattaactattaaataaaaattaactatatattaactagtgtaaattaataaatagaaatagagaaaaagggtattaattatgtttggaatttcgtcgggaataaattttgccattacatagaaatatctaatagataacgaaaaagtatcgtatgtatttttaatatagtgtaaaatattatatgtaaaataaaatgtaggtttttagttagaggcattataagaaaattttgagtataggttagcttttaattatgaatcttattgaaatttgattaataaaaatatgataggggattaaaatgaaactattttatatcgtatttcttattattatatggctgaatatatttttaggaaatgaaatcatccatacactgactgttttaataacaacattgtatattgttaattcaagaaaggggattaaaaatgacagagttgaataatattataaactctcttcaatctttgtttgagtctgaatcaggctataaaatttcgaaaaattcaggagttccatatcaaacagtacaagatttaagaaatgggaaaaccaaactagaagatgctagatttagaacgattattaaactttatagttactatgtctcattaaaagaacactaatcatgggacaataaagtattgctataataatttaatcattaaatgaaggaatagagcctaagacataataaatcaatgtcttaggctctacaatattatattggtagtagttgaccgaatgaaaatgcccatgtaacaagcatttttcaattataggcggggccccaacatagagaatttcaaaaagaaattctacagacaatgcaagttggcggggccccaacatagaagctggcggaaagtcagcttacaataatgtgcaagttggggagtgacaacgaaataaattttataaaatactatttctgtcacattcctactcccaattccatttaaatatatagaaaattttacctattatatacatcatacactttaaaaattatcatttaaataatctgatttggaattaaagtgcatgaagtataagtcaccttcatatactaatcaaagaggacgtcaacagttattttattaggatttttaacataaacatttgctagatctgaatgtaatcttttgcttaaatcaatagtgtagttattaccgccaccggtgatcttaagcttacctttattacgattttcgttatataatattttattttttattaacgcttctcgtgcacggaaatcgatttctttcaatgttaatactggtttattgccttggtatattttatgcgcaccaataatcgtttgtagtttatctttgtattgcacaaaaagattataagttttatcagaaggttttgcggctggtgtaacgccacctgtaaatgtctctctataagaccaccataactgatcagtatctttgtcttttagtccaaacacatctacgtaacgatcttttaactgattaatatttccccaactttcagcgccccataaagatatatgtgctgaccatgaatatctcttaagttcaacataaatgtttccattatcatattgatatagccatttatttgaaaatgaaaaatgaggctgtgtgtaatatttaattaattcattgatgttagtttcatcttgaccaatgctataagctttagcttcagagtaaaaactaaatactggtttttgattttgaggtaatacagtacctaatagtaataatgttgtcgttaaaattatatttttcgtgatgttcttactcattagaacatctcctttcagaggaatcatgatacgaggaataagaaatttaaatgtgagcgaagtcaatatagtatttgcgattatttttattaactccattattattgttagtttgatttttcgaggataacttcaatttttgcattttgaggttttttaacatatctatttgcatcagttgatggcaaccttttacttaaatctattgtgtagttattgtctgcacctgttattttaatttgtcctttattataagaattattatataattttttacttttaattaatgtttgacgaatacgaaaatctaattcttttaaagttaaaacaggcttattgccttcataaactggaaatccgccagtaaacgtttctgctttatctttatatgttacattcagtttatagtgtttatcgttagatgttgctgcaggagtaacaccaccagtaaacgtttcttgagataatgcaaaagaatcaatggtttcttggtcttttatgccaaaaatatcaacgcttttatttcttaattggttgatattgccccaactttcaggtccataaacttgaatatgactataccaagaaaactgtaacaacgttgcatgaatcgtaccgttatctttttgccataacgtactgttagagaaggttaaatatttttgcgagtaatatttagttaactcattaacgttagtttcgttttgatttatataataagctttcgcttcagatgaagaattgataggtgtattaggaaattgtgtagatgctgtacctaatagtaacaatgttgttgataaaataatttttttcgtgatgttattgttcattcgaatttctcctttgagtattgttggaatgtttaattataaaaaggggttaattagataattgaaattatccgcatttacaaaaggtaataggttagttagatttttcgagtatgacttcaatttctgcattacgaggatttttaacataacggtttgtgtcagttaattttaactttttacttaaatcaatcgtgtaattatttccatcagcagttatcttaatttgacctttattaaattctccgttatataactttttattttttattaatgtttgacgaatacggaaatctaattcttttaaagttaatactggtttatttcctttgtaaaattcatgtccaccgatgatagtttgttgtttatcactatattttaaaaatagtctataaggcttatcagatgaagtagctgctggcgtaacaccaccagtaaatgtttcatcataagtccagtaaccttcaactgtgtcctcatctttagttccaaatatatcaacgtatttatttcttaactgattaatgtttccccaactctcggatccaaacacttgaatatgactataccaaacccacgtttgcaatgttgcatgaatgctaccattgggcttttgccataaccattttccagataatgaaaaatgcggctgagtgtaatatttgattagttcattgatattagtctcgttttcactgatattataggcttttgcttcagatgaaaaactgattggtgttttaggaagttgtgttgatgtagtttctaaaagtaacaatgctgttgataaaactaatttattcatgatgttctttttcatatgaaaatctcctttgcgtgaattacccaaagtatataagctattacaccgattcggaattaaataaaagctaaaactatgttaaataaacttaaacagttagtagtgttatttaagcaaaacttatcatttttaagttttggacagaaacagtatctaataaagtaggcgggagttatatattaaaaacgatacgttagaattattctctaatcaattgtattaaattgtttgataattgaattttctaactacttgaaaaatagttatactttaaatgtagtacttattttaattatttcctactacttaaatttaatattaataaaatgttcatttaattattgataaaatattacaaattttaatagtaggttgtgtttattttgtatgcgcttacaatttaggtgtaactaaaataaaaggagttgttattaatgaaaaatttacgaaacagaagttttttaactttattagacttttcacgacaagaggtagaattcttattaacactctccgaggatttaaaacgtgctaaatatattggcactgaaaagcctatgttaaaaaataaaaatattgcactgttatttgaaaaagattctacaagaacgcgatgtgcatttgaagttgcagcgcatgatcaaggtgcaaatgtaacttatttaggcccaactggatcacaaatgggtaaaaaagaaacaactaaagatactgcacgtgtgcttggtggaatgtatgatggcattgaataccgtggtttttcacaaagaacagtagaaactttagctgagtattcaggcgtaccagtgtggaatggtttaactgatgaagatcatcctactcaagttcttgctgatttcttaacagcaaaagaagtcttaaaaaaagattatgcagatattaactttacatatgttggagatggtcgtaataacgttgcaaatgcattaatgcaaggtgctgccattatgggtatgaacttccatttagtttgtccaaaagaattaaatccaacagatgaattattaaatcgctgtaaaaatattgccgctgaaaatggtggcaacatattaatcacagatgatattgaccaaggtgtaaaaggttcggatgtaatttacactgatgtttgggtatcaatgggtgaacctgatgaagtatggaaagaacgacttgaattattgaaaccatatcaagtaaataaagaaataatggataaaactggtaatccaaatgttatttttgagcattgcttaccatctttccataatgctgatacgaaaataggtcaacaaatttttgaaaaatatggtattcgagaaatggaagttacagatgaagtattcgaaagtaaagcttcagttgtattccaagaagctgagaacagaatgcatacaatcaaagcagtcatggttgctacattgggtgaattttaaatgatataaggaagtgaatatgatggcgaaaatagtagtagcattaggtggtaatgctttaggaaaatcacctcaagaacaactcgagcttgttaaaaatactgcgaaatcattagtaggattaataacaaaaggacatgagattgttattagtcatggtaatggaccacaggttggaagcattaatttgggacttaactatgctgcagaacataaccaaggtccggcatttccatttgctgaatgtggcgcaatgagtcaagcttacatcggctatcaattacaagaaagcttacaaaatgaattgcattctattggaatggataaacaagtggtaacactagtgacacaagttgaagttgatgaaaatgatccggcatttaacaatccttcaaaaccaattgggttattttacaacaaagaagaagctgaacaaattcaaaaagaaaaaggatttatatttgttgaagatgctggaagaggatatagacgcgttgttccttcaccacaacccatctctattattgaattagagagtattaaaacacttattaaaaatgatacactcgttattgctgctggtggtggaggtataccagtaattagagagcaacatgatggttttaaaggtattgatgcagttatagacaaagataaaacaagtgcgttgttgggtgctaatattcaatgcgatcaattgattattttaacagcaattgattatgtatatattaattttaacactgaaaaccaacagcctttgaaaacaacaaatgttgatgaattaaaacgatatatagacgaaaatcaatttgcaaaaggaagtatgttaccaaaaattgaagcagccatatcatttattgaaaacaatccaaaaggaagtgtgcttataacatcattaaatgaattagatgctgccttagagggtaaagtaggtactgtgattaaaaagtaattgaattgaaacgcttttcaattactatatgtcaaatgcatgatttttattatttatgtgcaccccctgaaaataatgcctctattttgatgcggggtgcactttcttaatttatatttataaaatctttaaggtagaaatgctaggttaaatgtcgaaggagatgaaaccgtggaaaatacaattaatgaaagtgaaaagaaaaaacgatttaaattaaaaatgccaggtgcatttatgattttattcattttaacggttgttgcagttatagcaacatgggttattcctgctggtgcatattctaaactttcttacgaaccttcatcccaagaactaaagatagttaaccctcataaccaagtgaaaaaggttccgggtacgcaacaggaactagacaaaatgggggttaaaattaagattgaacaatttaaatcaggtgcaattaataagccggtatcaattccgaatacttatgaaagattaaagcaacatccagctggaccagaacaaataacaagtagcatggttgaaggtacgatagaagcggtcgatatcatggtattcattcttgtactagggggacttattggcgtagttcaagccagtggttcttttgaatcgggattgttagctttaacgaagaaaacaaaagggcatgaatttatgctaattgtgtttgtatcaatactaatgattatcggcgggacattatgtggtattgaagaagaagctgtagcattttatccgattttagtccctatatttatagcgttaggatacgattctatcgtttcagttggtgccatattccttgccagctctgtcggtagtacattttcaactattaacccgttctcggttgtaattgcctctaatgccgctggtacaacttttacggatggcttgtattggagaataggtgcttgtattgtcggtgcgatttttgttattagttatttatattggtactgtaaaaaaattaaaaacgatcctaaagcgtcatattcttatgaagacaaagatgcttttgaacagcaatggtctgtattaaaagatgacgatagtgcccattttactttgcgtaagaagataatccttacattatttgtactaccatttccaattatggtatggggagttatgacgcaaggttggtggttcccagttatggcttcagcatttttaatatttacaattataataatgtttattgctgggacaggtaaatctggattgggagaaaaaggaactgtagatgcatttgtcaatggtgcatcaagtttagtaggtgtatctttaattattggtttagctcgaggtattaatttagtgttgaatgaaggtatgatttcagatacaatcttacacttttcatcatctttagttcaacatatgagtggaccattatttatcatcgtattactatttattttcttctgtttaggttttatcgtgccatcatcttctggcttagcggtattatcaatgcctatctttgcaccactagctgatacagtaggtataccaagattcgtcatcgttacgacatatcaatttggtcaatatgcgatgttattcttagcgccgactggacttgttatggccacactacaaatgttaaacatgcgatattcacattggttccgatttgtatggccggtagttgcttttgtattgattttcggtggcggagtactaattacgcaagtactaatttattcataatttgaaatgctatattataaaaaatactaatggggttttatgcatctcgtaggtttgtagaaatactaaactaagcgaggtgcattattatttttgattaagaaaataatgacggtaatgataacactagtaagtaattgatacaatgctctatttaataatgatatttttaaaatttgtttttaatgtaatgttagatctatggtatattatatttatcgtggtaaatatgtatttgctgtaaacagtttttgtaacacatgatacatatggttgtgaaaatagcatatataaaggatggctataaatgacacatttgacaaaggttttagatacactaactggaatatgcgtagtattattatttagtaaatattttgtggcgtatgcaaatatggtgtttgattggaatttaagatggtatttgctagaaaacataccacatttgccaattatattatttattctgatgtttattttcggagtaccttctgaaatgataaaagataggcaaaggaaaaataacggtgtttaatttatcgatatttagaggtgataaaatttgtcaactattacaaagactaaaataaaaatctttattaattattttattggtatattagccttggcgtttgctgcttatatattatttaaataaaggttagagtgaaacgtgtttatgaactagacgttctagtatagttactacagctttagtcagaaggtatcattgataagatcatattaaatcaaagaggcattgatatacactaaaaagaggcaagattacctgcctctttttagttattaaatatacgtgttaattcttggtaatagtgttactgagacgcattacgaagaaatttatcttgtttttccttttttaaaaagaagtgaagatatcctataaagactctaagtactattacagtggctaataacacttcgataaacaaaagacctttccaaatgtctggaaacataagtacaggcaaactgttctttaaagcagttgctgagattactaaagggaatgtgaaagctgaaaatacgggcgaaaaaggttcttttagtaatttaggcaattgtataatgatataaaaataaaatatttgagctaatagtaaaaatataattacgataaaagcattcgccttaggaaaagctataacatatgctgcagcgactaaagaaaatggtgcacaaattgtcgatgtgttcggtttgattgacgtctgcaatggaaatgcttttaatcgcttgaaaactataggtaagacaatacaagtagctacaaagccatatattactgttaattgacctatgaaaaaatatccgctaacgggtgccgtcaatcctgcgatagcaataccaataaaaagtacagtccacgaaggataaacattttcaagtgaaaaatcttttaaatattttattgaaaaaataatcatatgcgtcataattcccacaaggcataaaatccaaataggcgttattaagctattgataaaagttatgttactaaaaaatgtatttaaataagtagtacctaaaaagccagacatgaaaaatgttgtgaacactgatgaaactagaggactgtttaattgttctttcacattattaaaatatttgatcatagtacataaaaggtgaatccaaatcaagaaagcaaagattccgcaaacagcgtttaaagtaagagataagtcttttaatagattacccaggcctaataatcctaagactagtcctgacgttactagaggtgctttttgaagtctcatgatttacaacctttcttatgtgattttcttcactaattatatcatgatagctatggccaattaataagaagagtgtgtactattacgttattagagtatgtatattggattgatagacacataattgacatttaaatctcaaaattaatgatatttgaggtatgctttgcaacctaaatattggaatatgtggaaaagtaattatttaatttaaatgatgattgaagatttacaagggggtgtacaaaatgagaaatcaaattcaaaaactattagacagtgatttgagcagtttacatatatcgaaacaaacaggagttccacaaagcacaatacacagaatgagaaaaaatgaaagatcattagacaatatgtcattgaaaaacgctgaactactttataaatttgccaatagtatatttagcaatgaaaattaagaagaataattagtgagttaaataattaaaaaaccacgtctcgatggacgtggttattttttttagatgtatataattataattataggatttcgggcccctgaaaagtccctaaaattttgaatagtatcaaaatctataggaataatataataataaaaatctctacgcatgcaaatggtgagtgttaaaaatcttggtgtagtgttggtgtagttcaggtgcagtatagatgaaatttgagcacaaaattacttaattaaaaatgtataaacaagtgtcagacgcgtgtcaattgtgtgtcaaaaaattctataacgaataagcatgcttgttttaattactgtattttcggggcttatgcgggggacgttttggtgacgcatcatactatattactgaaattcaaaacaaaaagagccccgtaatcacggaactcttttgtttggtaatgcgtataaaaatacctataaacgtcctgggagggattcgaacccccgaccgatggcttagaaggccattgctctatccagctgagctaccaggacacgtttaacaacacaagaattattatatctaaatgaacttaaattagcaataccttgtaaataaaaaatgtttatatttttcactattatagagctatttatctaaaaaggttcaataagacttaaatacgaattcaggcaacttaattgtgttaaatacagttttgaatgcctaactgtatttcttttctctttaaaatacagttaagtacattataagatgttgtgcggataaacaaactaattgcatcaaatttattttaaaataacaacaacaaaacgttaagcgaataacatttcggtgatttaaaagctacgcacgtttttgttatcttcaaatttaaattttaaggagtgttttcaatggaaggtttatttaacgcaattaaagataccgtaactgcagcaattaataatgatggcgcaaaattaggcacaagcattgtgagcatcgttgaaaatggcgtaggtttattaggtaaattattcggattctaatttcaatatgttatgtaagtaatcagtattatttcaaaggtgagggagagatttaaatgactggactagcagaagcaatcgcaaatactgtgcaagctgcacaacaacatgatagtgtgaaattaggcacaagtatcgtagacatcgttgctaacggtgtgggtttactaggtaaattatttggattctaatataataactaatattctttaaaataaactgggtgagcatactttaatgttatgcactcagtttattttatttgcagaaatttgagcctctgttaagatttagatacatagacaatataggagatggggaaattgggatataaaaatattttgatagactttgatgatacaattgttgatttttatgatgcagaagaatgggcgtttcactatatggcgaatgtttttaatcataaagcaacaaaggatgattttttaacatttaaaaaaatcaatcaccaacattgggaagcttttcaacaaaataaattaacgaagtctgaagtattatcagaacgatttgtgaattacttcaaacatcatcaaatggaagttgatgggcatcgtgcagatgtgttatttagaaatggattagcagaagctaaagttaaatactttgatcaaacattagaaacaattgtcgaattatcgaaaagacatgatttatatattgttactaatggtgtaaccgaaacgcaaaagagaaggttaaatcagacgccgttgcataaatatattaaaaagatatttatatctgaagaaacaggatatcaaaaacctaatccggaattttttaattatgtttttaatgatattggtgaggatgaaagacagcactcgattatagttggagattctttaacatctgacattctaggtggaatcaatgcgggtatagctacttgctggtttaattttagaggatttgatcataatccaggaattatacctgattatgaaattaattcatggaaacaactaaatgatattgtacgttaagacaaataatttgaaaatgatttacttatattagcttaagaaagtaattgtaaaaaagacactacgaaaagatgcattttcatgctcgtagtgtcgaatattattatcttatggtttccacaataagacatcatgtccctctatatttttagcttccacatctgtaaatccatgatgtaaaaagaaatccttagaatcatttctgccaatggctttaattggcatattgaaactctttgcaaaatcaatcaattctgaagcgtaccctctgttttgatattttggtaatacttctaacttccataataatatataatcttcaaaatctgggaagtagatttcttcgacatcacctttttttagtaatgccattctagctcctaattgatctccgacaaatatgccataaaatggtgaatctgaacttgcatcaatcatttgaccgtttaactcattgaccatgtataagtctttgttgccaaacgctctaaagttttcgaataattcgtcagttttgtaattaatttcaagacgtttgatttcactcatatttatctaccccttatttgtttactactattattatacattaaaccacttgtgtttttcattgatttgaaaatgtaaaacaatgaatattataaattttccatgattaaattgattttcaagccgtaaaattgtcaatcaccggtatagactttatactatagtttgtaatcgcgtacttaaggagaaaaaacatggactgtaaagtagttagtttaaatgaaaaagatcagtttataccaaaaataaagagcagtgaccctgtaataacaggattatttcaatatgatgcagctcaacaaactagttttgaaaaaaggatgtctaaagaaaataatggaagagaagcggcattagcgaatgttattcgtgaatatatgagtgatttaaagctttcaagctttcaagtgaacaagaattaaacatacaacatttagctaatggttcaaaagttgtgattggtggacaacaagcagggcttttcgggggaccattgtatacattccataaaatattttcaatcattactttatctaaggaattaacggatacacataagcaacaagtagtaccagttttttggattgcaggagaagatcatgatttcgatgaagtgaatcatacatttgtttataacgaaaatcatgggtcgctgcataaggttaaatatcatacaatggagatgccagagacgactgtctctagatattatcctgataaggctgagttgaaacaaactttaaaaacgatgttcattcatatgaaagaaactgttcatacacaaggtctactggagatttgtgacagaattattgaccaatatgactcgtggactgatatgtttaaagcactactgcatgaaacatttaaagcatatggcgttctatttatagatgcgcagtttgagccgttaagaaaaatggaagcgcctatgtttaaaaagattttgaaaaaacatcagttgcttgatgatgcttttagagcaacacaacaacgtactcaaaatcaaggcttgaatgcgatgatacaaacagatacaaatgttcatttattcttacatgatgaaaatatgcgtcaattagtttcgtatgatggtaagcattttaaattaaataaaacagataagacatatataaaggaagaaattataaatattgcggaaaatcaacctgaattattttctaataatgtagtgacaagaccattaatggaagaatggttatttaacacggtggcatttgttggaggaccgagtgaaattaagtactgggctgaactaaaagatgtatttgaactatttgatgttgaaatgcctatcgtgatgccaaggcttagaattacttatttaaatgaccgtatagaaaaattactttcgaaatacaatattccattagaaaaagtgttagtcgatggtgttgaaggagaaagaagtaagtttattagagaacaagcatcacatcaatttattgaaaaggtagaaggtatgattgaacaacagcgtcgtctaaacaaagacttattagatgaagtggcggggaatcaaaataatattaaccttgtgaataaaaataatgaaattcatatacaacagtatgattatttgttaaaacgttatcttttaaacattgaaagagaaaacgacatcagtatgaagcaatttagagaaattcaagaaacactccatccaatgggaggattacaagaaagaatatggaatccacttcaaattttgaatgattttgggacagatgtgttcaagccctccacctatccaccactttcttacacttttgatcatattattataaaaccttaatataccaagggtttagcccgatttatcttaatgataaatcgggcatttttttgttttttaaaataaatttcacaaattttgtataaatagtggtggatagtggggagatgtggtaaattatatataaggtgaggtgataaaaaatgttcatgggagaatacgatcatcaattagatacaaaaggacgtatgattataccgtccaagtttcgttatgacttaaatgagcgttttattatcacaagaggccttgataaatgtttattcggttacactctagacgaatggcaacagattgaagagaaaatgaaaaccttacctatgacaaaaaaaaagacgcacgtaagtttatgcgtatgttcttctctggtgctgttgaagtagaacttgataagcaagggcgtattaacatccctcaaaacttgaggaaatacgctaatttaactaaagaatgtacagtaatcggtgtttcaaatcgtattgagatttgggatagagaaacttggaatgatttctatgaagaatctgaagaaagtttcgaagatattgctgaagatttaatagattttgatttttaaaatggaggaattgaagtgtttcatcatatcagcgttatgttaaacgaaaccattgattatttaaatgtaaaagaaaatggtgtgtacattgactgtacgctaggtggagcgggacatgccctttatttactaaatcaattaaatgacgacggaagattaatagcaatcgatcaagaccaaactgcaattgataatgctaaagaggtattaaaggatcatttgcataaggtgacttttgttcatagcaacttccgtgaattaactcaaatattaaaagacttaaacattgaaaaagtagatggaatttattacgacttgggtgtttcaagcccacaactcgacattccagaacgaggattcagttatcaccatgacgcaacattagacatgcgtatggaccaaacacaagaactaacagcatatgaaattgttaacaattggtcatatgaagcgttagtgaagattttttatcgctatggcgaggagaaattttcaaaacagatagctcgaagaatcgaagcacatcgcgaacaacaaccaataacaacaacattagaattagttgacattataaaagaaggtattcctgcaaaagcaagaagaaaaggcggacatcctgcaaaacgagtatttcaagcactacgaattgcagtaaacgatgaattgtcagcttttgaagattcaatagaacaagcgattgaattagtgaaagtagatggcaggatttcggtaatcactttccattctttagaagatcgtttatgtaaacaggtgttccaagaatatgaaaaaggtccagaggtaccaagaggattaccagttataccagaagcatatacacctaagttaaagcgtgttaatcgtaaaccgattaccgctacagaagaagatttagatgacaataacagagcacgaagcgcgaaattacgtgtagctgaaatacttaaataaggagcaatttataatggctgtagaaaaagtgtaccaaccatatgacgaacaagtttataatagtataccgaagcaacaaccacaaactaagcccgaaaagaagactgtttcgagaaaagtggttgtacaattaactaaatttgaaaaagttttatacataactttgattactgtaattgctatgttaagtatttatatgctatctttaaaaatggatgcgtatgatacgcgaggaaagattgcagatttagattataaaatagataaacaatcaagtgaaaacagtgctttacaatctgaaatcaaaaagaattcttcttatgaacgcatatacgaaaaggctaagaaacaggggatgagccttgagaacgataatgtaaaggtagtgcgtagtaatggcgaagcaaaaaattaaaattaaaaaaaataaaataggggcagtcctacttgttggtttattcggactgctcttttttatattggttttaagaatttcatatatcatgattactggacattctaatggtcaagatttagtcatgaaggcaaatgaaaagtatttagttaagaatgcacaacaaccagaacgaggaaagatatatgatcgtaatggtaaagtgctagcagaagatgtagaaagatataaacttgttgcagtaatagataaaaaggcgagtgccaattctaaaaaacctaggcatgtagttgataaaaaagagactgcaaagaaattatctacagtcattaatatgaagccagaggaaattgaaaagagacttagtcaaaagaaagctttccaaattgaatttggacgcaaaggaacaaatttaacgtatcaggacaaattgaaaatagagaaaatgaatttgcctggtatttctttattgcctgaaacagaacgcttttatccaaatggcaattttgcatcacacttaattggtagagctcagaaaaatccggatactggtgaacttaaaggtgcacttggagttgaaaagatttttgatagttatttaagtggatctaaaggatcattgagatatattcatgatatttggggatatatcgcaccaaatactaaaaaagagaagcagcctaaacgtggtgatgatgtccatttaacaatcgattcaaatattcaagtatttgttgaagaagctttagatggcatggttgaaagataccagccgaaagatttatttgcggttgtcatggatgccaaaactggagaaattttagcatacagtcagcgaccaacatttaatcctgaaactggtaaagactttggtaaaaagtgggcaaatgacctttatcaaaacacatacgagcctggatcaacatttaaatcatatgggttagcagctgctattcaagaaggtgcttttgatcctgataagaaatataaatctggacatagagatattatgggttcacgtatttcagactggaatagagtcggttggggtgaaatcccaatgtcactcggatttacttattcatctaatacattgatgatgcatttacaagatttagttggtgcagacaaaatgaaatcttggtatgaacgatttggatttggaaaatcaactaaaggtatgtttgatggagaagcacctggtcaaattggatggagtaatgagttgcaacaaaaaacgtcatcatttggtcaatcgacaacagtaacacctgttcaaatgttacaagcgcaatcagcgttctttaatgatggtaatatgttaaaaccatggtttgtgaatagcgttgaaaatcctgttagtaaaagacaattttataaagggcaaaaacaaatcgcaggcaaaccaataacaaaagatactgctgaaaaagttgaaaagcaattggatttagttgtgaatagtaagaagagtcacgctgcaaactatcgtattgatggttatgaggtcgaaggtaagactggtacagcacaagtcgctgcacctaatggtggtggatacgttaaaggtccaaacccatattttgtaagttttatgggtgacgcgccgaagaaaaatcctaaagttattgtatacgctggtatgagcttggcacaaaaaaatgaccaagaagcttatgaattaggtgttagtaaagcgtttaaaccaataatggaaaatactttgaaatatttaaatgtaggtaaatcaaaagatgacacatctaatgcagagtatagtaaagtgccagatgttgaaggtcaagacaaacaaaaagctattgataatgtgagtgcaaaatcattagaaccagttactattggttctggcacacaaataaaagcacaatctataaaagcagggaataaagtcttacctcatagtaaagtactgttattaacagatggagacttaactatgcctgacatgtcaggatggacgaaagaagatgtcattgcttttgaaaacctaacaaatattaaagtaaatttaaaaggtagcggttttgtgtcccaccaatcaattagtaagggacaaaaacttactgaaaaagataaaatagacgtagaattttcatcagagaatgtagacagcaattcgacgaataattctgattcaaattcagatgataagaagaaatctgacagtaaaactgacaaggataagtcggactaacaagaatggctacattaaattaggatgtattgtcactatttgtttttactaaagtaatgctgtgatagaaaacaacatcttcatttaatctttataaataagtgttgatagagaattttaaggtagacgaggtcagattaacttgtttgttataggcaaactttttatactggcctcttatgccgtaaaaaagaaaaattataaattttgattacaactttgtttatttaattgaaaaattgataatatattagtggttaaaaaagtctggattaagaagaggagatagttatgatttttgtatatgcgttattagcgctagtgattacatttgttttggtacctgttttaatacctacattaaaaaggatgaaatttggtcaaagtattcgagaagaaggtccacaaagccatatgaagaagactggtacaccaacgatgggtggactaacatttctattaagtattgtgataacgtctttggtggctattatatttgtagatcaagctaatccaatcatactgttattatttgtgacgattggttttgggttaattggttttatagatgattatattattgttgttaaaaagaataaccaaggtttaacaagtaaacagaagtttttggcgcaaattggtattgcgattatattctttgttttaagtaatgtgtttcatttggtgaatttttctacgagcatacatattccatttacgaatgtagcaatcccactatcatttgcatatgttattttcattgttttttggcaagtaggtttttctaatgcagtaaatttaacagatggtttagatggattagcaactggactgtcaattatcggatttacaatgtatgccatcatgagctttgtgttaggagaaacggcaattggtattttctgtatcattatgttgtttgcacttttaggatttttaccatataacattaaccctgctaaagtgtttatgggagatacaggtagcttagctttaggtggtatatttgctaccatttcaatcatgcttaatcaggaattatcattaatttttataggtttagtattcgtaattgaaacattatctgttatgttacaagtcgctagctttaaattgactggaaagcgtatatttaaaatgagtccgattcatcatcattttgaattgataggatggagcgaatggaaagtagttacagtattttgggctgttggtctgatttcaggtttaatcggtttatggattggagtgcattaagatgcttaattatacagggttagaaaataaaaatgtattagttgtcggtttggcaaaaagtggttatgaagcagctaaattattaagtaaattaggtgcgaatgtaactgtcaatgatggaaaagacttatcacaagatgctcatgcaaaagatttagaatctatgggcatttctgttgtaagtggaagtcatccattaacgttgcttgataataatccaataattgttaaaaatcctggaataccttatacagtatctattattgatgaagcagtgaaacgaggtttgaaaattttaacagaagttgagttaagttatctaatctctgaagcaccaatcatagctgtaacgggtacaaatggtaaaacgacagttacttctctaattggagatatgtttaaaaaaagtcgcttaactggaagattatccggcaatattggttatgttgcatctaaagtagcacaagaagtaaagcctacagattatttagttacagagttgtcgtcattccagttacttggaatcgaaaagtataaaccacacattgctataattactaacatttattcggcgcatctagattaccatgaaaatttagaaaactatcaaaatgctaaaaagcaaatatataaaaatcaaacggaagaggattatttgatttgtaattatcatcaaagacaagtgatagagtcggaagaattaaaagctaagacattgtatttctcaactcaacaagaagttgatggtatttatattaaagatggttttatcgtttataaaggtgttcgtattattaacactgaagatctagtattgcctggtgaacataatttagaaaatatattagcagctgtgcttgcttgtattttagctggtgtacctattaaagcaattattgatagtttaactacattttcaggaatagagcatagattgcaatatgttggtactaatagaactaataaatattataatgattccaaagcaacaaacacgctagcaacacagtttgccttaaattcatttaatcaaccaatcatttggttatgtggtggtttggatcgagggaatgaatttgacgaactcattccttatatggaaaatgttcgcgcgatggttgtattcggacaaacgaaagctaagtttgctaaactaggtaatagtcaagggaaatcggtcattgaagcgaacaatgtcgaagacgctgttgataaagtacaagatattatagaaccaaatgatgttgtattattgtcacctgcttgtgcgagttgggatcaatatagtacttttgaagagcgtggagagaaatttattgaaagattccgtgcccatttaccatcttattaaagggtgtgagtattgatggatgataaaacgaagaacgatcaacaagaatcaaatgaagataaagatgaattagaattatttacgaggaatacatctaagaaaagacggcaaagaaaaagatcaaaggctacacatttttctaatcaaaataaagatgatacatctcaacaagctgattttgatgaagaaatttacttgataaataaagacttcaaaaaagaagaaagcaatgataaaaataatgattctgcttctagtcatgcgaatgataataatatcgatgattctacagactctaatattgaaaatgaggattatagatataatcaagaaattgacgaccaaaatgaatcgaatgtaatttcagtcgacaacgaacaacctcaatcagctcctaaagaacaaaatagcgactcgattgatgaggaaacagtaacgaaaaaagaacgaaaaagtaaagtaacacaattaaagccattaacacttgaagaaaagcggaagttaagacgtaagcgacaaaagcgaatccaatacagtgttattacaatattggtattgttgattgctgttatattaatttacatgttttcaccacttagtaaaattgcgcatgtaaatataaatggaaataatcacgttagtacttcaaagataaacaaagttttaggtgttaaaaatgattcaaggatgtatacgtttagtaaaaaaaatgctattaatgatctcgaagagaatccattaatcaaaagtgttgagatacacaagcaattaccaaacacattaaacgtagatatcacagaaaatgaaattattgctttagtgaaatataaaggtaaatatttacctttattagaaaatggtaaattgcttaaaggttcaaatgatgtcaaaattaatgatgcacctgtcatggatggtttcaaaggtacaaaagaagatgatatgattaaggcgttatctgaaatgacacctgaagttagacgatatattgccgaagtgacatacgccccaagtaaaaacaaacaaagcagaattgaattgtttacgacagatggacttcaagtaatcggtgatatttcgacgatatctaagaaaatgaaatattatccgcagatgtcacaatcattatcaagggatagttcgggtaaactaaaaacacgaggctatattgatttatcagtcggtgcttcatttatcccataccgtggaaacacgtctagtcaatcagaaagcgataaaaatgtgactaaatcatctcaagaggaaaatcaagcaaaagaagaattacaaagcgttttaaacaaaattaacaaacaatcaagtaagaataattaaaaaattttgatattgtctatgtttatagttcacaagccattcaacgtattgtaaactaaggatagtgtatttttttaatagtaatttgtcaggaggtgcctatctatggaagaacattactacgtaagtattgatattggatcatcaagcgtaaaaacaatagtaggcgagaaatttcacaatggtataaatgtgataggtacaggacaaacctacacgagcggtataaaaaatggtttaattgatgattttgatattgcgcgacaagcaatcaaagacacaattaaaaaggcatcaatcgcttcgggtgttgatattaaagaagttttcctgaaattacctatcattggaacggaagtttatgatgaatcaaatgaaatcgacttttatgaggatacagaaatcaacggttcacatatcgaaaaagtattagaaggtattagagaaaaaaatgatgtgcaagaaacagaagtaattaatgtgttcccgattcgttttatagtcgataaagaaaatgaggtttcagaccctaaagaattaattgccagacattcattaaaggttgaagcaggcgtaattgctattcaaaaatcgattttaattaatatgattaaatgcgtagaagcatgtggtgttgatgtattagatgtttactctgatgcatataactatggttcaatcctaacagctactgaaaaagagttaggtgcatgtgtcattgatattggtgaagacgttacgcaagttgctttttatgaacgcggtgaattagtagatgctgattctatcgaaatggcagggcgtgatattacagacgatattgcacaaggattaaacacttcttatgaaactgctgaaaaagttaaacaccaatatggtcatgcattctatgattctgcttcagatcaagatatcttcactgttgaacaggttgatagtgatgaaacagtacagtatactcaaaaagatttgagtgactttattgaagcgcgtgtagaagaaatattcttcgaagtatttgatgttttacaagatttaggattaacaaaagtaaatggtgggtttattgtaactggtggatctgcaaacttacttggcgtaaaagaattattatcagatatggtaagtgaaaaagttagaattcacacgccatcacaaatgggaattagaaaacctgaattttcttcagcaatttctacaatttctagtagtatcgcttttgatgagttattagattatgttacaattaattatcatgataatgaagaaactgaagaagatgttattgatgtgaaagacaaagataacgaatctaaattaggcggatttgattggtttaaacgtaaaacaaacaaaaaagatactcatgaaaatgaagtagagtcaacagatgaagaaatttatcaatcagaagataatcatcaggaacataaacagaatcatgaacatgttcaagacaaagataaagataaagaagaaagtaaattcaaaaaactaatgaaatctctatttgaatgattattggccaataaaactaggaggaaatttaaatgttagaatttgaacaaggatttaatcatttagcgactttaaaggtcattggtgtaggtggtggcggtaacaacgccgtaaaccgaatgattgaccacggaatgaataatgttgaatttatcgctatcaacacagacggtcaagctttaaacttatctaaagctgaatctaaaatccaaatcggtgaaaaattaacacgtggtttaggagcaggagctaatcctgaaatcggtaaaaaagctgcagaggaatctcgtgaacaaattgaagatgcaatccaaggtgcagacatggtatttgttacttctggtatgggtggcggaactggtactggtgcagcaccagtcgttgctaaaattgcaaaagaaatgggcgcattaactgttggtgttgtaactcgtccatttagttttgaaggacgtaaacgtcaaactcaagctgctgctggagtagaagctatgaaagctgcagtagatacattaatcgttataccaaatgaccgtttattagatatcgttgacaaatctacgccaatgatggaagcatttaaagaagctgacaacgtgttacgccaaggtgtacaaggtatctcagacttaatcgctgtttctggtgaagtaaacttagactttgcagacgttaagacaattatgtctaaccaaggttctgcattaatgggtattggtgtttcttctggtgaaaatagagcggtagaagctgctaaaaaagcaatctcttctccattacttgaaacatctatcgttggtgcacaaggtgtgcttatgaatattactggtggcgagtcattgtcattatttgaagcacaagaggctgctgatattgtccaagatgctgcagatgaagacgttaatatgattttcggtacagttattaatcctgaattacaagatgagattgttgtaacagttattgcaactggttttgatgacaaaccaacatcacatggtcgtaaatctggtagcactggattcggaacaagcgtaaatacttctagcaatgcaacttctaaagatgaatcattcacttcaaattcatcaaatgcacaagcaactgatagtgtaagtgaaagaacacatacaactaaagaagatgatattcctagcttcattagaaatagagaagaaagacgttcaagaagaacaagacgttaatcggttaatatatatacacaaataattcaacacaaatcatcagataacatatctgatgatttttttactaatttttagaacatgtagaaggacatttaagtttttcaaagttattaaaagtgtttaagtatcgtgtgaaaattaagtcaaaaattatttgcgcaacattttaactttaaacataaatgttatattatataattattaactttgtacagttagacgaagataatttaaatgaaatgatggtgacgatcgagtgaatgataattttaaaaagcaaccgcatcatttaatatatgaagagttattacaacaaggtattactctaggtattacaactagaggagatggtttaagtgactatcctaaaaatgcttttaatatggcgagatatattgatgatcgcccatataatattactcaacatcaattgcaattagctgaagaaattgcgtttgatagaaaaaattgggtgtttcccattcaaacacatgaaaataaagtcgcttgtattacaaaggatgatataggcacaaatatagacactttaactgatgcgcttcatggtattgatgcgatgtacacatatgatagtaatgtcttattaacgatgtgttatgcagactgtgtaccagtatatttttatagtacaaaacatcattttattgcattggcgcatgcaggttggcgtggtacctatactgaaattgtaaaagaagtgctaaaacatgtgaactttgatttgaaagacttacatgtcgttattggaccatctacatcatcaagttatgaaattaatgatgatattaaaaataaatttgaaacattgccaattgatagtgccaactatattgaaactagaggacgagatcgtcatggtattgatttgaaaaaagccaatgctgcattattaatttattatggtgttcctaaagaaaatatttatacgacagcgtatgctacatctgaacatttagaattatttttctcttatcgattagaaaaaggtcaaacaggacgcatgttagcattcattggtcaacagtaaacaaggaggagatatgtttgcgtgtgaaagataatttacaacaaatctcaacacaaattaatgacaaaagtgaaaaaaataatttttcaacaaaaccaaacgtgattgcagttacaaaatatgttacaatagagcgagctaaagaagcgtatgaggctggaataagacattttggtgagaatagattggaaggcttttttcaaaagaaagaagcattaccatcagatgcggtgatccattttataggatcattacaatctcgaaaagttaaggacgttataaacgacgtagattatttccatgctttagatcgattgagcttagccaaagaaattaacaaacgtgcagaacataaaattaaatgtttcttgcaagtgaacgtttcgggagaagcttctaaacatggtattgctttagaagatgttgatcagtttatagatgatcttaaaaaatatgacaaaatcgaaattgtaggtttaatgacgatggcaccattgacagatgatgaagcatatattagatcgttatttaaacagttacgtttgaaaaaagaagaaatacaacgactcaatttagaatatgcgccttgtgatgaattatcaatgggaatgagtaatgactatcttattgcagttgaagaaggtgcgacgtttgttagaattgggactaaacttgtaggagaagaggagtgagccacttggctttaaaagatttatttagtggattttttgtaatagatgatgaagaggaagtagaagtacctgacaaacaacaacaggtaaatgaagcgccagcaaaagagcagtcacaacaaacaacaaaacaaaacgcaatcaaatcagtccctcaaaaatctgcatcaagatatacaacaacgtcagaagaaaggaataaccgtatgtctaattattcaaaaaataattcacgtaatgttgtaactatgaacaatgctacaccaaacaatgcatcacaagaaagttcaaaaatgtgtttattcgaaccacgtgttttttcagatacacaagatattgctgatgagcttaaaaaccgccgtgcgacacttgtcaatttacaacgtattgataaagtatcagcgaaaagaattattgattttttaagcggtactgtttatgcaatcggtggagatatccaacgtgtaggtactgatattttcttatgtacgcctgataatgtggaagtagctggaagcattacagaccatattgaaaatatggaacattcattcgactaaggagttaacatatggatataaatgtgctagctacaatatttaaattcatcctttttgttgttgaaatttattatttcggcatgattatatatttctttacatcttgggtaccaagtattagagaaactaaggtaggttattttttagcgaaaatatatgaacctttcttacaaccatttagaaaagtaattccacctattggaattatcgacatatcatcaatcgctgcaattatcgttttagtattattccaaaaagggttactccaaatctttaattggattttaattcaattacaataaattaagcgacataacgaggcaagggtacatgatactttagcctcgtttttgatatgtatttttctgaatataagggcaatagatggtattttataatttttttaaggtagtgattaacatagatatttatcaacactttagacaggaagaatacgaattaattgatcagctaacggataaatgtgatcaagcggaacagcattatgcaccagtattaacgcattttttagatccaagagggcaatatatattggaagtgatttgtggcagttatgaagatttaaacgtatctttttatggtggacctaatgctgaaagaaaaagagcaatcatttcgccgaactattatgaacctaaagaaagcgactttgaattaactttaatggaaatagattatcctgaaaaattcgtcactttaaaacatcaacatattttagggacattaatgtctttaggtatcgaacgcgaacaagttggagatataattgtgaatgaacgaattcaatttgttttgacaagtagattggaatcatttattatgttagaattacaacgtattaaaggcgcatcagttaaactttatactattccagtaacagatatgatacaatctaatgagaattggaaaaatgaaagtgcaacagttagttctttaaggttagatgttgttattaaagaaatgatacgtaaatcacgtacgattgcgaaacaactaatcgaaaaaaaacgtgttaaagtgaatcacactattgttgattcagcagattttcaattacaagcaaatgatttaatatccatccaaggttttggtagagcacacattactgacttaggtggtaaaactaaaaaagataaaacgcacattacctatagaacattattcaaatagtaatgatttaaggaggataacaaatgccttttacaccaaatgaaattaagaataaagagttttcacgtgtaaagaatggtttagaacctactgaagttgctaattttttggagcaactaagcactgaaattgaacgtcttaaagaagataaaaaacaacttgaaaaagtaatcgaagagagagatactaatattaagtcttatcaagacgtgcatcaatctgtaagtgatgctttgatacaagctcaaaaagctggtgaagaaactaagcaagctgcagagaaacaagctgaagcgattatagctaaggcagaagcgcaagctaatcaaatggttggtgacgcggtagaaaaagcacgccgtttagcattccagactgaagatatgaaacgtcaatcaaaagtatttagatcgcgtttccgtatgttagttgaagcgcaattagacttattaaaaaacgaagattgggattacttgttgaattatgatttagacgctgaacaagtgacgcttgaaaatattcatcatttgcatgaaaatgatttaaagccagatgaagttgcagcaaatgcacaaaataatgcatcaaatacaccagacaataatcaacaatccaatgattcagaaacaactaagaagtaagaattaaataaagacagacgcgtaatatacatttaacttttcacagcgaattaggtaatggtgagagcctagtaaaagcatgtatgttatatcactggctttttaatatttaaataatgtaatgagagaactctaagttgagttaataagggtggtaccgcgagcaatcgtcccttttaatttaacttagagttttttaaatttttaaggagtgaaaaaaatggattacaaagaaacgttattaatgcctaaaacagatttcccaatgcgaggtggtttaccaaacaaggaaccgcaaattcaagaaaaatgggatgcagaagatcaataccataaagcgttagaaaaaaataaaggtaacgaaacattcattttacatgatggcccaccatacgcgaatggtaacttacatatgggacatgccttgaacaaaattttaaaagactttattgtacgttataaaactatgcaagggttctatgcaccatacgtaccaggttgggatacacatggtttaccaattgaacaagcattaacgaaaaaaggtgttgaccgaaagaaaatgtcaacagctgaattccgtgagaaatgtaaagaatttgctttagaacaaattgaattacagaaaaaagattttagacgtttaggtgttcgtggtgactttaatgatccatatattacattaaaacctgaatacgaagctgcacaaattcgtatttttggagaaatggcagataaaggtttaatttataaaggtaaaaagccagtttattggtctccttcaagtgagtcttcattagcagaagcagaaattgaatatcacgataaacgttcagcatcaatttacgttgcatttgacgttaaagatgacaaaggtgtcgttgatgcagatgctaaatttattatctggacaacaacgccatggacaattccatcaaatgttgcgattaccgttcatcctgaattaaaatatggtcaatacaatgtaaatggcgaaaaatatattattgcagaagccttgtctgacgctgtagcagaagcactggattgggataaagcatcaatcaaattagaaaaagaatacacaggtaaagaattagagtatgttgtagcacaacatccattcttagacagagaatcgttagtgattaatggtgatcatgttactacagatgctggtacaggttgtgtacatacagcaccaggtcacggggaagatgactatattgttggtcaaaaatatgaattgccagtaattagtccaatcgatgataaaggtgtatttactgaagaaggcggccaatttgaagggatgttctatgataaagctaataaagccgttactgatttattaacagaaaaaggtgcactattaaaattagactttattacacatagctatccacacgactggagaacaaaaaaacctgtaatcttccgtgctacaccacaatggtttgcctcaatcagtaaagtaagacaagatattttagatgcaatcgaaaatacaaacttcaaagtaaattggggtaaaacacgtatttacaatatggttcgtgaccgtggcgaatgggttatttctcgtcaacgtgtgtggggtgtaccgttaccagtattttatgctgaaaatggcgaaattatcatgacgaaagaaacagtgaatcatgttgctgatttatttgcagaacacggttcaaatatttggtttgaaagagaagcgaaagacttactaccagaaggatttacacatccaggcagccctaacggtacatttactaaagaaacagacattatggacgtttggtttgattctggttcatcacaccgtggcgtgttggaaacaagaccggaattaagtttcccagcggatatgtatttagaaggtagtgaccaatatcgtggttggttcaactcttctatcacaacttcagttgctacaagaggagtatcaccttataaattcttactttctcatggttttgttatggacggtgaaggtaagaaaatgagtaaatctttaggtaatgtgattgtacctgaccaagtggttaaacaaaaaggtgctgatattgcgagactttgggtaagtagtacggactatttagctgatgttagaatttctgatgaaattttaaaacaaacatctgatgtttatcgtaaaatcagaaatacattaagatttatgttaggtaacattaacgatttcaatcctgacacagatagcattcctgaatcagagttattagaagtggatcgttacttgctaaatcgtttacgtgaatttactgcaagtacgattaacaactatgaaaactttgactacttaaatatttatcaagaagttcaaaactttatcaatgttgagttaagtaatttctatttggattacggtaaagatattttatatattgaacaacgtgattctcatatccgtcgtagtatgcaaacagtgttatatcaaattttagttgatatgacgaagttgttagcaccaatcttagtgcatacagctgaagaagtttggtctcatacaccacatgttaaagaagaaagtgttcacttagcagacatgcctaaagttgtagaagtagatcaagctttattggataaatggcgtacatttatgaatttacgtgatgatgtgaaccgtgcattagaaactgctcgtaatgaaaaagttattggtaaatcattagaagctaaagttacgattgctagtaacgataaatttaatgcatctgaattcttaacttcatttgatgcattacatcaattatttatcgtgtcacaagttaaagttgtagataagttagacgatcaggcaacagcttatgaacatggtgatattgtcatcgaacatgcagatggtgaaaaatgtgaaagatgttggaactattcagaggatcttggtgctgttgatgaattgacgcatctatgtccacgatgccaacaagttgtaaaatcacttgtataattgaaattgtataaagtactcatacagatgatataaattaaagctctcttcataatcatgttgtagtttttgttgacatgatgaagagagtttttttgtgaataaaaaaatgaccaagttaccggtcatatatgtaaaaaatgtgcgatttactaaaataaaaattattcaggaatggtacaaattctctgaggcatataaatgcgttatagttgctattctcaattatgttcgcgataattttaagtaaaagtaagcacagatattgaatttgataggagttaattgaatgtatcataacagtaacgcaaactttgtcaatggtatcactttaaatgtgagagataagaatgaattaaagccattttatgaggacatattaggattaaatattataaatgagacattaacatcgatacaatatgaagtaggtcaaaataatcatgtcattacacttgttgaattacaaaatggacgtgaacctttaatgtccgaagcgggactgtttcatatcgcaattaaactacctcaaattagtgatttagctaatttactaattcatttaagcgaatatgatattccagttaacggaggtatacagcctgcttcgttatcattattttttgaagacccggaaggaaacggttttaaattttatgttgataaagacgaagcgcaatggacgaggcaaaataatttagtaaaaattgatattagaccattaaatgtaccgagattagtgagtcatgcaacaaaattgttatggttaggtattccagatgacgctattataggtgcattgcatattaagacaattcatttatcagaggtaaaagagtactacctcgattattttggattagagcaatcggcatatatggatgattattcaatatttttagcatcgaatggctattatcaacatttggccatgaatgattgggtatcagcaacgaaacgtgtagaaaattttgatacgtatggattagcaattgttgactttcattatcctgaaacaacacatttaaatttacaaggtccggatggtatctattatcgctttaatcatatcgaagttgaagattagtatatactttgaatggacgaaccatataatgaatcgtttttaatgatctttttatacaagttatgaaggaggctgggacattaagttcttaggcaatgtaaaaagctgatttctattaattatttgatagaaatcagcttttttgatatgtattttataatgtacagctcgttgagctgctattttccttatattaattgccattaatacaaaacctagctctcgtttaactttatttattcctcgaactgacattcgagtgaaactcaaaatagcctactttcttaaattaacaatatctattctcatagaatttgtccaattaagtgtagacgattcatgtcttatttttttaaagtatttaaaagtaaaattacatgttaatacgtagtattaatggcgagactcctgagggagcagtgccagtcgaagaccgaggctgagacggcaccctaggaagggacccatcatcaaaaattctatttatagaattttacagtaatgtgccagatgggcatagcgaagccattcaatacgaagtattgtataaatagagaacagcagtaagataatttttaattagaaaatatcttactactgtctttttagggatttatgttccagcctgctttcctaatttttaatgtcatcttaaatatgataaatgaataattaagttcatatttaatgtcaaaacatagtagtttatcaagtattgagttagtaacattagatttaatgtaatatgcttactttttttattagcaggtgtaagctataatataaagagttgtctcatggacgattgattggaggaacgaaaatgcacaaaaaatattttattggcacttccattttaatagcagtatttgtcgttatatttgaccaagttactaaatatattatagctactacaatgaaaattggagattcatttgaagtgataccgcactttttaaacataacatcacatcgaaataatggtgctgcatggggaatattgagtggaaaaatgacatttttctttattattaccattattatattaatagccttagtatatttctttattaaagatgctcaatataatttgtttatgcaagttgctattagtttactttttgcaggtgcacttggaaactttattgatagaattttaacaggagaagttgttgactttattgatacaaatatttttggttatgattttccaatatttaatatcgcagattcaagtttaacaattggtgtaatattaattattattgccttattaaaggatacttccaataaaaaggagaaggaggttaagtaatggagacttatgaatttaacattacagataaagaacaaacaggtatgcgtgtagataagttgctgcctgaattaaataatgattggtctcgtaaccagatacaagattggattaaagcaggtttagtcgttgcaaacgataaagttgttaaatctaattataaagtgaaacttaatgatcatatagttgtcactgaaaaagaagtggttgaagctgatattctacctgaaaatttaaatttagatatttattatgaagatgacgatgttgcagttgtatataaaccgaaaggcatggtagttcatccatcaccagggcattataccaatacattagttaatggtttaatgtatcaaattaaaaatttgtcaggtattaatggagaaattcgtccaggtattgttcaccgtatagatatggatacttctggtttattaatggttgctaaaaatgatattgctcatcgtgggcttgtagaacaattaatggataaatctgttaaaagaaaatatatcgctttagttcacgggaatattcctcatgattacggtacaatcgatgcgccaattggtagaaacaaaaatgatcgtcaatctatggctgttgttgatgatggtaaggaagcagtgacacattttaacgtactagaacattttaaagattatacgcttgttgaatgtcaacttgaaacaggacgtacgcatcaaatccgtgttcacatgaaatatattggcttcccattagttggtgatccaaagtatggaccgaaaaagacattggatattggtggtcaagctctacatgctggacttattggattcgaacatccagtaacaggtgaatatattgaaagacatgctgaattaccacaagactttgaagatttattagatacaattcgaaaaagagatgcataattgtgtcgtgctataattacgataacattattatgtaaactataagtgtttatcgttttcgttttttttaaatgaaaacacattataaaatagattaaggttaacatttttactgagtatggttaatttttcaatatagattgacaaagcgcctgattagtattatccttataacagtttaagtacaacataaagagtctttaattgagcgtccagagagacgtcaaagacatgaaaatatagatatatactaaaatgatcataacactttcacatatgcaagaataagtagtaatactacgattcttctatgtaaataggctgattgtatatactaaacctcatgtcgatattaaagacatgaggttttttgtttctaaattttgaaagggtgagaatatgtctgaacgtatcataatggatgatgccgcaatacaacgtacagtgacgagaatcgctcacgaaattttggagtataacaaaggtactgataatttaattcttttaggtatcaaaacaagaggtgaatatttagcgaatcgtatacaagataaaattcatcaaattgagcaacaacgtatacctactggaacaattgatattacatactttagagatgatatagagcacatgtcatcacttacgacaaaagacgcaatagacatcgacacagatattacagataaagtagtcatcattattgacgatgtgctgtatactggtcgaacggttcgtgcttcacttgatgctattttgctaaatgctagacctattaaaattggtttagctgctttggttgatcgaggacatcgtgagttaccaattcgagcagattttgttggtaaaaatatacctacttctaaagaggaaacggtaagtgtctatttagaagaaatggatcaaagaaatgcagttataattaaataataccccttttaattcagtacgagagactgaaaaaggtgggggagttgaatgataaataagttttcatatgcttgtttatctaataataccctcatgttcgacaactataagtcaatttctatggacgaaaatgacttgtagcaacttgtcacactttttgtctctttacatatactgatgtaaagagatttttttattatcggaggaaatgaatattatgcaaaatgatgaaatgtttgaacgaacagtaaaacccgtactagatgtaaatgaaaaaccacaaccagcgcaatgggcatttttaagcttacaacatttatttgcgatgtttggcgcaacagtactagtaccattcttaacaggactaccaatatcagcagcgttactagcttcgggaatcggtacattactttatatcttaataacgaaggcgcaaataccagcatacttgggatctagctttgcatttatcacgccaattatcacgggattaagtacgcatagcttaggagacatgcttgtagcattattcatgagtggtgttatgtacgtcatcatcgggattctaatcaaattaagtgggacagcatggttaatgaaattattaccaccagttgttgttggaccagtcatcatggtaattggtttaagcttagcgcctactgcagtcaatatggcaatgtatgaaaatcctggagatatgaaaggttacaatatcagtttcttaattgttgcaatgataaccttgcttgtaacaatagtcgttcaaggattttttaaaggattcctatctttaattccagttcttgtaggtattatcgtaggttatgtggtagcgatttttatggggattgtgaaatttgatgcaattatgtcagcaaaatggatagatttccctcatatttatctgccatttaaagattatgtaccttcatttcacttaggacttgtacttgtaatgattccgattgtgttcgtaacagtaagtgaacatattgggcaccaaatggtattgaataaaatcgtaggtagaaacttctttgaaaagccaggacttgataaatcaatcattggtgatggtgtttctacaatgtttgccagtattattggtggaccaccaagtacaacatacggtgaaaatatcggtgtattagcgattaccagaatatacagtatttacgtcattggtggtgcagcagttatagcaattgttttagcattcattggtaagttcactgcattaatttcttctatacctacaccagttatgggaggagtatctatattacttttcggtattattgcagcaagtggcttaagaatgttagttgaaagcaaagtagattttgcgaacaatcgaaatttagttatagcttctgtaattttagttgtaggtatcggtaatttagtatttaacttaaaagaaattggtatcaaccttcaaattgaggggatggcattagctgcactttcaggaattattttgaacttaatcttacctaaagagaaaaaacaaaacaattaagatttacaaattaaggagggcgcttttatgaatcatttattatcaatggaacatttatctacagatcaaatatacaaacttatccaaaaggcaagtcaatttaaatctggtgaacgtcaactaccaaactttgaagggaaatatgtcgcaaatttattctttgaaaattctactcgaacaaaatgtagttttgaaatggcagaacttaagctagggttaaaaacgattagctttgaaacatcaacatcatctgtttcaaaaggtgaatctttatatgacacatgtaaaactttagaaagtattggctgtgatttattagtcattagacatccgtttaataactactatgaaaaattagcgaatattaacatcccaattgcgaatgctggtgatggtagtggacaacatccaacacaaagtttacttgatttaatgacgatatatgaagaatatggatattttgaaggcttgaatgtattgatttgtggagacattaaaaattcacgtgtcgcacgtagtaattaccatagtttaaaagcattaggtgcaaacgtaatgtttaatagcccaaatgcttggattgatgattctttagaagcaccttatgtaaatatagatgatgttatagaaacagtagatatagttatgttattaagaattcaacatgaaaggcatgggcttgcagaagaaactagatttgcagcagatgattatcatcaaaagcatggcttaaatgaagtacgctataacaaattacaagaacatgctattgttatgcatccggcacctgtgaatagaggagtagaaatacaaagcgatttagtagaagcttcaaaatcaagaatttttaagcaaatggaaaatggcgtttacttaagaatggcagtcattgatgaattattaaaataggtaaggggacgaaaatgatgaaattaattaaaaacggtaaagtattacaaaatggcgaattacaacaagcagatattttaattgatggtaaggtaattaaacaaattgcacctgcaattgaaccaagcaatggtgttgacatcatagatgcgaaaggtcactttgtgtcacctggatttgtcgatgttcatgttcatttacgtgaacctggtggtgaatataaagagacaattgaaactggtactaaagctgctgctagaggcggatttacaactgtatgtccaatgcctaacacaagaccggtaccagattctgtagaacattttgaagctttacaaaaattaatcgatgacaatgctcaagtacgtgtattaccttatgcttcaattacaacacgtcaattaggtaaagaattggttgatttcccagcactagtaaaagaaggtgcctttgcgtttacagatgacggtgtaggagtacaaactgcaagcatgatgtatgaaggcatgattgaagctgcaaaagtaaacaaagccatcgtagcacactgtgaagataattcattaatctatggtggtgcaatgcatgaagggaaacgcagtaaagagttaggtataccaggtattccaaacatttgtgaatctgttcaaatcgcaagagatgtactattagctgaagcagcaggttgtcattatcatgtatgtcatgtttctactaaagaaagtgttagagtcattcgtgacgctaaacgcgcaggcattcatgttacagctgaagttacaccacaccatttattgttaacagaagatgatattcctggtaataatgccatttataaaatgaatccaccattgagaagtactgaagatagagaggctttgttagaagggttactagacggtacaattgactgtatcgcaacagaccatgcaccacatgcacgtgatgaaaaagcacaaccaatggaaaaagcaccattcggaattgttggtagtgaaacagcattcccattattatatacgcattttgtaaaaaatggtgattggacattacaacaattagtagattacttaacaattaaaccatgtgagacatttaatttagaatacggcacattaaaagaaaatggttatgcagatttaacaatcattgatttagatagtgaacaagaaattaaaggagaagatttcttatcaaaagcagataatacaccatttatcggctataaagtttatggaaatccgatcttaacaatggttgaaggcgaagttaaatttgagggggataaataatatgcaaagcaaacgttatctagtgttagaagacggttctttttacgaaggctaccgtttaggatctgataacttaactgtaggagaaattgtatttaatacagcgatgacaggttatcaagaaactatttcagatccatcatatacaggtcagatcattacttttacgtatccattaatcggtaattatggtatcaatagagacgattttgaatcattagtacctacattaaacggtattgtagtgaaagaagcgagtgcgcatccaagtaattttagacagcaaaagacacttcatgacgttttagaattgcatcaaattccagggattgcaggtgttgatacaagaagtattacgcgtaaaattcgacaacacggtgtgttaaaagctggttttactgatcgaaaagaagatattgatcaacttgtcaaacatttacaacaagtagaattacctaaaaacgaagtagaaatcgtttcgactaaaacaccgtatgtttcgacaggtaaggatctaagtgtcgtacttgtagactttggtaagaagcaaaatattgttcgagaattaaacgtcagaggttgtaacgtcacagttgtaccatatacaactactgccgaagaaattttagcaatggctccagatggcgttatgctatcaaacggaccaggtaatcctgaagttgtagaatgtgcgattccaatgattcaaggaattttagggaaaattccgttctttggtatctgtctaggacatcaactttttgcattatctcaaggagcaagctcatttaaaatgaagtttggtcatcgtggtgcgaaccatccagttaaaaatttagagactggaaaagttgatattacgagtcaaaaccatggatatgcaatagatatagattcgttaaaaagtactgatttagaagttactcatcttgcattaaatgatggtactgtagaaggtttaaaacataaaacattaccagcattttctgttcaataccatcctgaagcaaatccaggaccgtcagattcaaactatctatttgatgattttgtagcaatgatgactaattttaaggaaaaggagcgtcatatcaatgcctaaacgtaatgatatcaaaacaattttagtaatagggtctgggccaattatcataggtcaagcagctgaatttgattatgctggaacacaagcatgtctagctttaaaagaagagggatatcgagttattcttgtaaattcaaatccagcgacaatcatgactgataaggaaattgcggataaagtatatatcgaaccgttaactcatgattttatagcgcgaattatacgtaaagagcaacctgacgctttacttccaactttaggtggtcaaacaggtttaaacatggcgattcaactacacgaaagtggtgtgcttcaagataataacgtccaattattaggaactgagctaacatcaattcaacaagcagaagaccgtgaaatgtttagaacattaatgaatgatttaaacgttcctgtaccagagagtgacattgtaaatacagtagagcaagcctttaaattcaaagagcaagtgggatacccgctaattgttagaccggcatttacgatgggtggtaccggaggcggtatttgtcataatgatgaagaattacatgaaatcgtctcaaatggtcttcattatagtccagcaacgcaatgtttattagaaaaatctatcgcaggttttaaagaaatcgaatacgaagtaatgcgtgataaaaacgataatgccatcgttgtatgtaacatggaaaatattgatccagttggtattcatacaggcgattcaattgttgtggctcctagtcaaacattatcagatgttgagtatcaaatgttacgtgatgtttcattaaaagttattcgagctttaggtatcgaaggtggttgtaatgttcaattagcattagatccccattcattcgattattatattatagaagtaaatccgcgtgtatcacgttcatcagcgttagcttcaaaagcaacaggatatcctattgcaaaattagctgctaaaatcgcggttggtctaacattagatgaaatgttaaatccaattacaggaacatcttatgcagcgtttgaaccaactttagactatgtgatttcaaaaataccaagatttccttttgataaatttgaaaaaggagaacgagagcttggcacacaaatgaaagcaacaggtgaagttatggccattggtcgaacttacgaagaatcattgttaaaagcaattcgatcacttgagtatggtgtgcatcacttaggattaccaaatggtgaaagcttcgatcttgattatattaaagaacgtatttcacaccaagatgatgaacgattatttttcatcggcgaagcaattagaagaggcacaacattagaagaaattcataatatgactcagattgattacttcttcttacacaagttccaaaacattattgatattgagcatcaattaaaagagcatcaaggtgatttagaatatcttaaatatgcaaaagattatggatttagtgataaaacaatagcgcatcgctttaatatgacggaagaagaagtatatcaattgcgtatggaaaatgatattaaacctgtttacaagatggttgatacttgcgcagctgaatttgaatcttcaacaccatattattatggtacatacgaaactgaaaatgaatccatagttactgacaaagaaaaaatcttagtattaggctctggaccaattcgaatcggccaaggtgtagaatttgactatgcgacagttcacgccgtttgggcaattcaaaaagcagggtacgaagcgataattgtgaataacaatccagaaacagtttcaacagacttctcaatttctgacaaattatactttgaacctttaactgaagaagatgtgatgaatatcattaatttagaaaaacctaaaggtgtcgttgtacaatttggaggacaaacagcgattaatttagcagacaaattggctaaacatggtgttaaaatacttggtacttcactagaaaatctaaatcgtgctgaagatagaaaagaatttgaagcactattaagaaaaattaacgtgccacagccacaagggaaaacagctacatcacctgaggaagcattagcgaatgctgcagaaatcggatatccggttgtagtaagaccttcttatgtattaggtggtcgcgcaatggaaattgtagacaatgacaaagagttagaaaactatatgacccaggctgtaaaagcgagtccggaacatccggtactagtcgatagatatttaactggtaaagaaattgaagttgatgcgatttgtgatggagaaacggtcattattccaggaatcatggaacatattgaacgtgctggtgtgcatagtggtgactcaatcgctgtatatccaccacaaactttgacagaagacgagttagcaacacttgaggactatactataaaattagctaaaggtttaaacatcattggcttaatcaacattcaattcgttatagctcacgatggtgtgtatgttttagaagtaaatccacgttctagtagaacggtaccattcttaagtaaaattactgatattccaatggcacaattagctatgcgagcaatcattggggaaaaactaacagatatgggttatcaagaaggggttcaaccatatgctgagggtgtctttgtgaaagcaccagtatttagttttaataaattgaaaaatgttgatattactttaggacctgaaatgaagtcaacaggtgaagtgatggggaaagatactacattagaaaaggcgttattcaaagggttaacaggtagtggcgttgaagttaaagatcacggtacagtattaatgaccgtcagtgacaaagataaagaggaagttgttaaattggcacaacgcttaaatgaagttggctataaaattttagcaacgtctggaacagctaataaattagctgagtatgacatacctgcagaagtagtaggcaaaattggtggcgaaaatgatttattaacacgtattcaaaatggtgatgttcaaatcgttataaatacaatgactaaaggtaaagaagtagaaagggatggcttccaaattagacgtactacagttgaaaatggtattccatgtttgacatctttagatacagctaatgccttaacgaatgtaattgaaagtatgacatttacaatgcgtcaaatgtaaatcaatcaaactgtatcggtggggctgtaattaaccatttacttaaagaagtttatattacagcctcattattttaatgaatttcttaatataaagggagacatatatgatgaaagatttaccaattattgcattagattttgaatcaaaagaaaaagtaaatcaatttttagatttatttgatgaatcattattcgtaaaagtaggtatggaacttttttatcaagaaggtcctcaattaattaatgagataaaagaaagaggccatgatgtatttttagatttaaaactgcatgatattcctaatacagttggtaaggcgatggaaggactagctaaattgaatgttgatctggtaaatgttcatgctgctggtggcgtaaaaatgatgtctgaggccattaaaggattaagaaaacataatcaagatacaaaaattattgcagtaacacagcttacgtcaacaacagaagacatgttacgacacgaacaaaatatacaaacatcgattgaagaggccgttttaaattatgccaagttagcaaatgcagctggtttagatggcgttgtttgttcacctcttgaaagtcgtatgttgactgaaaagttaggtacatcatttttaaaagtaacaccaggtattagacctaaaggtgcatctcaaaatgaccaacaccgtattacgacaccggaagaagcaagacagcttggttcgacgcatattgtagtcggtagaccgattacacaaagtgacaatccagtcgaaagttatcataaaattaaagaaagttggttagtataatggctaaagaaattgcaaaatcattattagatattgaagctgtaacattatcaccaaatgatttatatacatggagttcaggtattaaatcaccgatttactgtgataaccgtgttacgttaagttatcctttagttcgaggcgcaatccgcgatggtttaattaacttaattaaagaacactttcctgaagtagaagttatttctggtactgcaacagctggtattccacatgcagcttttattgctgaaaaattaaaattaccaatgaattatgttcgttcatcaaataagagtcatggtaagcaaaatcaaatcgaaggtgctaaaagtgaaggtaaaaaagtagttgtgatagaagatttaatttcgacagggggatcttcagtcacagcagttgaagccttaaaactagcaggtgcagaagtattaggtgttgtagctatctttacttacggtttgaaaaaagcagatgatacatttagcaatattcaactacctttttacactttaagtgattacaatgaattaattgaagtagctgaaaatgaaggtaaaatttctagtgaagatatccaaacattagttgaatggagagacaacttagcataatatagacactagaaggaggaattcaacaaatgaatgacaaaacatctaatgatttatatgggaagataaaacattgtaacgaatttatcaatcattcaaatgattccaatctatctagtagtcacgatgtcgacgaaagttcaacgaagcaaaaacatataaaaaataaaacaactatagatcataatgatgatttatttaaacatgtaaaggatatattacgtaaacaaggacaaatttaaaaacaaaaaagctatagtgtttaatatcaggggctgcttaaccacatccgaatattacaaacactatagcttttattatataaaaaatttattagcggataattaactttattaaaatccaaccaattaagaatacgagtaataggactaatactggaatcacataatgtaacataacgtccctcctttaacttaattttaattgtaatcaaatttgacaataagtcaaaacattaatacctatgataagtatcatttattaacatatgtatcatatttttaatcttgcgtaatttttatcgttaactatgtgatttaatcaacaggccaataagacgtttgtcattcgtgcacataacggtacgacgcgcttttgtcattttaattatgttaagataatagtagttatagaagttcaatctataggaggcatagcatggatattccaaaaatcacgacatttttaatgtttaataaccaagctgaagaagctgttaaactatacacaagcttatttgaagatagtgagattataacaatggctaagtatggtgaaaatggacctggtgatcccgggactgtacaacactcaatatttacattaaatggacaagtattcatggcgattgatgctaatagtggcacagaattaccaatgaatcctgcgatttcattatttgttacagtaaaagatactattgaaatggaacgactatttaatggattaaaagatgaaggtgccattttaatgccaaaaacgaatatgccaccatacagagagtttgcttgggttcaagataagtttggagtaagttttcaattagcattacctgagtaaaaggattcgcacagcgttgaatgataaagaaacactttttcttatgcatgcgttttacctatgtatttctattttaagtacacattagcattttagtttcgctcatttttaaaatcacaaagataatttgtaacttaaatgatgatacgttatttaaaaacacgatacttcgtttcaatgaacgcattaaataataaataaacacctcaccataagaaaggactactttcttttgtgaggtgtttatttgtcgacaacttgattatgattgtttcattttttgaataagttcataatcaggtgtagcatacaaagttttttgattgtcatatgttacaaacccaggctttgcacctgatggtttatgcacatttttaattaatgtataatcaacaggtatttgtccagaattaccagcttttgaaaagtatcctgctaacatagccgcttccttgattgtcgtatcacttggtgcatcattaaatataacgacatgtgaaccaggaatatcttttgtgtgtaaccatgtgtgagtttttttagcttttttatttgttaaataatcattttgcttgttattcttaccaacatatatatcgtcgccatcagttgatacataatgttgtaattgaatctgcgctttctttttcttagtttgatttttacgctgtttcataaagccttgttctgctaattcatctctaatttcatcaatgtcatggacagaaatatgatgtaattgttgttcgattgttgaaaaataatctatattgtctttcgtcaattgaatttgatgttgtaattcacgttctctcgttttcatacgattatattgtttataataatattgagcatttgctgatggggattttgtaggatttaaaggaatgacaacttcttcattcgtataataattcaatgccgtcacttctttatcgccttgcttaattcgatatatattagcagtgatcaattcaccatataactgttcagtatctttatttttagactgctcatattcttcaatcaacttcgctaatttattttgatatttgtgcaactgctgttgaacaaatcgaactaaatcattcgcacgttgtttaacgcgttcacgttcgccacgcgcatcataaaaacgatcaagcaaatcatttaatgaatcgtatgtaactgtatcatcattaaattgatttaactttataaaatagaaatcctctttacctgtttcatgatttttatgaaaaataggagtaggtggtaacttggtttctgccattacttcgtcaaatgcttctggtaatgttgatgaagtcataaattgacgacgactaacgatttcattcgtaattaaagggctaaatccttcaaactgattcaataattgtttagcaatattacctgcgttaaaatcgatatatttcaacacctctgcacctgtaatatcatacggatttattttgtgctgagtaggtggtgcttcataattaaatcctggcattactgtacgatagtgattcgtatttggtgttaagtgtttaaatccttcaattattttgcgattttcatctactaaaattaagttactatgtttacccataatctcaaggatgacagtgcggtaaatagtatcgccaatttcatctttactctttatatcgatttcaatgcgacgatcattaccaatttgcttaatcgattcgataataccaccttctaagtgttttctaaaaacacgcgcaaacatgggtggattaaatggattatcatattttttagtagtcaattgtaatcttgaaaagtttggatggattgacaataacaattgatggttttgtctattttgacgtacaaccattagtatcgtgtcattatcaggttgattgattttgtgaacacgtcctgttgttaaaaattgtagagactcaaccattttctttgtaaataagccatcataagccataatttatcttccaccttcttcatatcattcgtttcattttaacatgattgtaacttttcagtatagttattgaaccatacattatgccatacattttacattatctaaaagtttgcaattcaatttatttaattaaaattaatcgtgcaatataacgatattgttagacttaatagaaattatggcatgcaatttcaaatatgctatacaatataaagaacaatgtgatatcatatttaaataatagaagattagcttagagaggtcgtaaggcatggataatgaaaaaggattgttaatcgttttatcaggaccatctggagtaggtaaaggtactgttagaaaacgaatatttgaagatccaagtacatcatataagtattctatttcaatgacaacacgtcaaatgcgtgaaggtgaagttgatggcgtagattacttttttaaaactagggatgcgtttgaagctttaatcaaagatgaccaatttatagaatatgctgaatatgtaggcaactattatggtacaccagttcaatatgttaaagatacaatggacgaaggtcatgatgtatttttagaaattgaagtagaaggtgcaaagcaagttagaaagaaatttccagatgcgctatttattttcttagcacctccaagtttagaacacttgagagagcgattagtaggtagaggaacagaatctgatgagaaaatacaaagtcgtattaacgaagcgcgtaaagaagttgaaatgatgaatttatacgattacgttgtagttaatgatgaagtagaacttgcgaagaatagaattcaatgtattgtagaagctgagcacttaaaaagagagcgcgtagaagctaagtatagaaaaatgattttggaggctaaaaaataatgttaaatccacctttaaaccaattaacgtcacaaattaaatcaaagtatttaattgcaacaactgcagcgaaaagagcgcgtgaaattgatgaacaacctgaaactgaattattaagtgaatatcattcatttaaaccagttggtagagcgttagaagaaattgctgacggtaaaattcgccctgttatttcaagtgattattatggtaaagaatagtttcgaccattaaaaatatgtgaagctagacgtacatcaaatacgtcaaggcatatccaaatcaaacgcacctatgtaggtgtgtttttttagtttatccaatgattgatgttataataatactaaatttgtatctataaaaaagtaatgagcatttgtgcgcatatgatgatgtaaagcgtaaatgtcatagtgatatttaagggagattgaatatgaagaaaatattattagccgttacaggtggcattgcggcatataaagcaattgatttgacaagtaagttaacacaatctgggtatgaagttcgcgttatgttaacgaatcacgcacaaaaatttgtgacaccattagcatttcaagcaataagtcgaaatgctgtttatacagatacttttatagaagaaaatccttcagaaatacagcatattgcattaggtgattgggcagatgcaatcattgttgcacctgcaacggcaaatacaattgcaaaattgagtgtaggtattgctgatgatttggtgacatcaacgttgctagcaacagagacaccgaaatttattgcgcctgctatgaatgtgcatatgtatgaaaataaacgtacgcagcaaaatattaatattttaaaagaagatgggtatcattttatcgaaccaggaagcggatttctagcatgtggttatgttgctaaaggacgtatggaagaaccgcttcaaatcgtttctgtaattgatgctcattttcaaaatagtaatcgtttagctaatagttcatttcaagataaacgcgcattggttacagcaggaccaactattgaagttatcgatccagtcagatttgtatccaatcgttcttctggaaaaatgggctatgcaatagctgaagcattgcgaaatcgaggagctatcgtgacgttagttgctggtcctacaacactagaggatccaaaagatattgaagttattcatgttcaaagtgctgaagaaatgtttgaacaagtgacaagccgatttgacgaacaagatattgttgtaaaagcagcagccgtatctgactatacaccggttgatgtattagaacataagatgaaaaagcaggatggtgatttgtcagtatcttttaaacgtactaaagacattcttaaatatttaggtgaacataaaacatcacagtatttaataggctttgcagcagagactgaagatattgaaaattatgcacaacaaaaattacgcaagaaaaatgcagatgtgattatttcaaataatgttggggatatgtctatcggatttagttctgatgataatgaattgacaatgcattttaaaaataatgaaaaagtaaatatcaagaaaggaaaaaaagtagtattagctgcacaaattttagatgaactagaaactaggtggcaataatgatagcgaaagtcatagtcgatgtcgcgtcgaagagcgttgactataaatttgattatataattcccgaacaactcgaatctgtcatccaacctggtgtgcgtgtaattgtaccttttggaccaagaacgattcaaggttatgtaatggaagtaacagcagaacctgatgcacaacttgacgtttcgaagttaaaaaaaatcatagaagtgaaagatatacaaccagaattaacatcagaattaatagctttaagtgagtggatgggttcaactcatgtcattaaacgtatttctatgctagaagtgatgcttccgagtgctattaaagcgaagtataaaaaagcatttaagatgaaagatgacatagagctaccttcagctttattacaaaaatttgataagcatggttactattattataaagatgcgcaaaaaaataatgatattcaattgcttatgaagttgttaaaagatgatatcgttgaagaaaaaacgattctcacacaaaatataactaaaaaaaccaagcgtgctgttcgtgtcattgaagggtatcatcctgatgaagtattagctaagttggagaaagttattaaacaatacgatttgtatgcttacttgtctgaagaacaacataaaacaatatttttaactgatattgaggatatgggcttttcaaaatccagtttagatggacttatcaaaaaaggttatgttgaaaaatatgacgcggttgttgaaagagacccatttaaagatcgtgttttcgaacaagaatcaaaacagcaattaacagaagaccaatataaagcatatgaagcgattaaagctaaaattgtaagccaagagcaagaaacatttttacttcatggtgtgacgggatcaggtaaaacagaagtatatttacaaacgatagaagatgttttaagccaaggaaaacaggcgatgatgttagttcctgaaatcgctctaacaccgcaaatggttttacgcttcaaacgtcgatttggtgatgacgttgctgtattacattctggcttatctaatggggaacgttatgatgaatggcaaaaaattagggatggtcgtgcgagagtaagtgttggtgcaaggtcaagtgtgttcgcacctttcaaaaatttagggttaatcatcattgatgaagaacatgaatctacatataaacaagaagattatccgagatatcacgctagagaaattgcccaatggcgaagtgaatatcatcactgtccagtcattttaggaagtgcaacaccatgtcttgaaagttatgcacgagctgaaaaaggcgtttatcatttgctatcattaccaaacagagtgaaccaacaagctttacctgaaattgatatagtagacatgcgtgaagaattgagtgaaggtaatcggtcaatgttttcaaaagatttacgtgaagccatacaattaagattagatcgacaggaacaagttgttttatttttaaatcgacgtggttatgcatcgtttatgttatgtcgggattgtggatatgtaccgcaatgtccaaactgtgatatttcattaacgtatcataaaacgacagacttattaaaatgtcactattgtggttaccaagagacgccaccgaatcaatgtccaaattgtgagagtgaacacattcgacaagtaggtactggtactcagaaagttgaagaactattgcaacaagaatttgaagatgcgcgcataattaggatggatgtagatacaacctcaaagaaaggtgcacatgaaaagttattgactgaattcgaaaaaggtaacggtgacattttactaggtactcagatgattgcgaaaggattagattatccaaatattactttagttggtgtgctgaatgcagatacaatgttaaatttacctgattttcgggcgagcgaacgtacttatcaactattaacgcaagtggctggtagagctggtcgtcatgaaaaggcaggtcaagtcatcattcaaacgtataatccagatcattattcaatattggatgttcaaaaaaatgattatttaacattttatcgtcaggaaatggaatatcgtaaattaggaaagtatccaccgtattattatttgattaatttcacaatctcacataaagaaatgaagaaggttatggtagcatcgcagcatgttcataaaattttattacagcatttaacagaaaaagcgcttgtactaggtccatctccggcagcacttgcgagaatcaacaatgaatttagattccaaattttagtgaaatataaaagtgaacctggattattacaagccattcagtttttagatgactattaccatgaaaaatttataaaagaaaaattagcattgaagattgatattgatccacagatgatgatgtaacattactaattattagaaacaagttcagtatgtacgagtatttgaaccagtgtttgaatatttactttaagtacagaaaaagggcagaatatacaactgttaactatttaaattagcagtttatattctgtctttttatatggctttataacttacgtgattttggtttgataaggaatttattagtattttcatttacgaattctgattttaatgcaagcgccatacttactgatgaataaaagtactaatgattaaacaaactatttttaaatggcaaattgaaatagtgcgaattttaaacttataaattaatggctataaactattttatatctatctatgttttaactacttaaattattagacaaaacaattttcttaaattatcaattaaagtatttaaaaatattgatggttaatgtaaaatatcaatataaataagttttttaaatttatgtatgtttatttgattcaaacaaaataacttaagaggagaaagtttatgaaaaagacactgggatgtttacttttaattatgcttttagtcgtagcaggttgttcttttggtgggaatcataaattatcatcaaagaaatcagaagaatcaaaacaagaaactgtaaaaaaagaatcggaagaagagaaagatccagatttagagaaatatgaagaaatagagaagaaaatgaaaggaattaaagatgcgccatctcttgataagttggatccattaatgacagaaaagtcgtttacgaatagtaaagggattcaaggatggaaagattacaaagaattaatgggtaaagtggaacttgcagattatagatttactaaagattcaaaaggatcttcaataaaagatgttgatgcattctttaaaggtaagaaaggtataaaaaggaaagtgattgaaacacacgatgatgtaaaacaagttgattattggtatgtagatccagatggaaagaaaattggcaattcaaacacacctgttttttacgcagaaattatgacaaaatataaagatggaaagttagtttatgcatcagtcgaaccaggatcttacgtaatacataaagatgatgcaattaaatatgacgattattctaagttaaaaaaattaagtcagctaactaaacttgatcatccaaaaccagttccatatagcgtagctcaaatcaaatctttcggagtacctttaacaagcgtttcatttatgacacatggatcaaaggatactaaagatgaagtgttgccggcattggcctatttcactttttcaccaaaaaattatgaagacaagtctaatccagatccaaaagttttaaatttagtacatatggatttcttaaatgcatctagtgattttggtaacgcacattttgttgttttaagtaaatatattaaagagtatgaatcaaactatgaaacagcgtcagatgattctttaaaatagtatttactgtgtgaaaaataaatagtgtactacattaaataatcgcaataataatcccgataaacaatcagcattactgcttatcacatagagttcgtaataactataactctatgattcgcaaataataaatgattgtcatcgggatttatttttatcaatttataaagtgacattaccttgttcatcagcaggtttgaaaacagtaatcactgcactaataattgctaaaatgtgtgggatacctgtccaacagaatattaagtgtagaataccttgcatattcttgccggcataaaatttatgaataccaaaactacctaagaacaatgctaataaaatataaataactttgtttacttgcatttctttccctccagttgaattgcttataatgacattagcttctctttttattatacccacttttagttcaaacattctagtttaagcattcccaatcatctaaatttcagttattcaatccttacaataaatttaggattacatttcagttgcattgtattattttacgtgtgaaatatacgtaatgaatcacatgacaatcttcaaattgaaaaatatacattctatgatgtaaggtcgcatttttaatatatttacgttataatagtttgatgaattttattgaggagtaagagttatggcgattaaaaagttagtaccagcatcgcatcctattttaacgaaaaaagcgcaagcagttaaaacatttgatgattcgttaaaaagattattacaagatttagaagatacaatgtatgcacaagaagctgctggcttatgtgcacctcaaattaatcagtcattgcaagtggcaattattgatatggaaatggaaggattattacaacttgttaatccgaaaattattagtcaatcaaatgaaacaataacagacttagaaggttcaattacattgccagatgtttacggcgaagtgacaagaagtaaaatgatagttgtcgaaagttatgacgtcaatgggaacaaagttgaactaactgcacatgaagatgtagcaagaatgattttgcatattatagatcaaatgaacggtatcccttttacagaacgtgcggaccgtattttaacagataaagaagtggaggcatattttataaatgactaaaataatatttatgggtacaccagacttttcaacaactgttttagaaatgcttattgcagaacatgatgtcattgcagtcgtaacgcaaccagatcgacctgttggacgtaaacgtgttatgacaccaccaccagttaaaaaagttgcaatgaaatatgatttacctgtatatcaacctgaaaaattaagtggatcagaagaattagaacaattgcttcaattagatgtagatttaattgtaactgctgcttttggacaattattacctgaatcattgttggcattaccaaatcttggggcaattaatgtacatgcatcattgttaccgaagtatagaggtggtgcaccaattcatcaggcaattatcgatggtgaacaagaaaccggcataacaattatgtatatggttaaaaaattagatgcgggtaatattatttcgcaacaagcaattaaaatagaagaaaatgataatgtcggtacgatgcatgataaattaagtgtattaggggcagatttattaaaagaaactttaccatctattatagagggcacaaatgaaagcgtacctcaagatgatacgcaagcaacatttgcttccaatattcgacgcgaagatgagcgaattagctggaataaaccaggaagacaagtgtttaatcaaattcgtggattatcaccatggccagttgcttatacaactatggatgacactaacttgaaaatatacgatgctgaactcgttgagactaataagataaacgagcctggaaccattatagaaacgactaaaaaagccattattgttgctacaaatgataatgaagctgttgcaattaaagatatgcaattagctgggaaaaagagaatgttagctgccaattatttaagtggtgcgcaaaacacactagtagggaagaaacttatatgatagaaaacgtgagaagtcttgcttttgacacgattcaagatatattaaatgaaggtgcgtatagtaacttgcgtatcaatgaagtgttgtcagaaaatgaattaaatgcaatggataaggctttatttacagaaattgtctacggaaccgttaaaagaaaatatacgttagatttttatttaaagccttttgtgaaaacaaagattaaggcatgggttaggcaattattatggatgagtatttatcaatatgtttatttagataaagttccaaatcatgccattattaatgaagcagttgaaatagcaaaagaacgcggtggctatcataatggtaatgtcgtaaatggtattttacgtacaatgatgcgtagtgacttacctgattttaatgaaattgcagatcctaaaaaaagaatggcaatcgagtatagtatgccgaagtggattatagatcattgggcaacacattatggtctcgaagaaactgaaaaaattttacagtcatttttagaaacgacatcaacaactgtgcgtgccaacctgacgcgagcatcattagatgatattattgaaaagttgcaagacgaaggttatgacgttgaaaaagatcatgacttaccttattgtctccatataggaggacaaccaattattcattctcgttcatttaaagatggattcgtttcaattcaagataaaagctcaatgtttgttgcacacattatgaatgtagaccgacatgatcacgtattagatgcatgtagtgcacctggcggtaaagcttgtcacattgctgaagttttaatgccagaagggcaagttgacgcttcagatatacatgatcacaaaatagacttaattaattttaatataaaaaaattacgattaacaaatattaaagcttttcaacatgatgcgacaaaaccttatgataaaacatacgataagatacttgttgatgcaccatgtagcggattaggtgtaatgagacataagccggagattaagtatactcaaagcaaacaacatattgagtcactagttgaattacagcttgaaatattggaaaatgtaaaaaacaatgtaaaaataggtggagaaatcatctattcaacatgtacaattgagcaactagaaaatgaaaacgtgatttatacgtttttgaaaaataataaaaacttcgaatttgaaccgtttcaacatccgataactggagagttggtcaaaacgttacaaatcatgccgcaagactttaattcagatggattctttatcactaagataaaaagaaaggacaattaggaatgataactgctgaaaagaaaaagaagaataaatttcttccaaattttgacaagcaatcaatatattcattgcgatttgacgaaatgcaaaactggctcgttgaacaagggcaacaaaaatttcgagcgaaacagatttttgaatggttatatcaaaaaagagtagattcgattgatgaaatgacgaacttatcgaaagacttacgacagcttttaaaagataactttactgttacaactttaacaactgtagtaaaacaagaaagtaaagacggtacaattaaattcttatttgaattacaagatggctatacaattgaaactgttttaatgagacatgattatggaaattcagtatgtgtaacgacacaagtaggttgtcgcatcggatgtacgttttgtgcttctacacttggcggcttaaaaagaaaccttgaagctggcgaaattgtttcacaagttttaacagttcaaaaagcccttgatgctacagaagagcgcgtatctcaaattgtcataatgggtatcggtgaaccatttgaaaattatgatgaaatgatggactttttaagaatcgtcaatgatgataacagtttaaatattggtgcacgtcacattacagtatcaacatcaggtatcattcctagaatatatgactttgcggatgaagatattcaaattaattttgctgtaagcttacacgccgcaaaagatgaagtgcgatcacgcttgatgccaattaaccgtgcatataatgttgagaagttaatcgaagcaattcaatattatcaagaaaaaacaaatcgtcgtgttacttttgaatatggtctgtttggtggtgtgaatgaccaactagaacatgcaagagaattagcacatttaataaaaggcttaaactgccatgttaacttaattcctgtcaaccatgttccagaaagaaattatgtgaaaacggctaaaaatgatatctttaaatttgaaaaagaattaaagagactaggaattaatgccacaatacgtcgtgaacaaggttcggatattgacgcagcttgtggtcaattaagagcaaaggaacgacaagtagaaacgaggtaaagacaaatgctagaggcacaattttttactgatactggacaacatagagataagaatgaagatgcgggtggtattttttataatcaaactaatcaacaacttttagttctgtgtgatggtatgggtggccataaagcaggagaagttgcaagtaaatttgttacagatgagttgaaatcccgttttgaagcggaaaatcttatagaacaacatcaagctgaaaattggttgcgtaataatataaaagatataaattttcagttatatcactatgcacaagaaaatgcagaatataaaggtatgggtacaacatgtgtttgtgcacttgtttttgaaaaatcagttgtgatagcaaatgtcggtgattctagagcctatgttattaatagtcgacaaattgaacaaattactagtgatcactcatttgttaatcatcttgttttaacgggtcaaattacgccggaagaagcatttacacatccacaacgtaatattattacgaaggtgatgggcacagataaacgtgtgagtccagatttgtttattaagcgattaaatttttatgattatttattattaaattcagatggattaactgattatgttaaagacaatgaaattaagcgtttgttagtaaaagaaggtacaatagaagatcatggtgatcaattaatgcaattggcattagataaccattcgaaagataacgttactttcatactcgcggctattgaaggtgataaagtatgataggtaaaataataaatgaacgatataaaattgtagataagcttggcggcggtggcatgagtaccgtttatcttgctgaagatacgatacttaacattaaagttgcaattaaggcgatttttataccacctagagaaaaagaagaaacattaaaacgttttgaacgagaagtacataactcatcacagctatcacatcaaaatatagtaagtatgatcgatgttgatgaagaagatgactgttactacttagtaatggaatatatcgaaggtccgactttgtctgagtatattgaaagtcatgggccattaagtgttgacacagcgattaattttacgaatcaaatattggatggcattaaacatgcgcatgatatgcgtattgtacatagagatattaagccacaaaatatattaattgacagcaataaaacgttgaaaatatttgattttggaattgctaaagctttaagtgagacgtctttaactcagactaatcatgtgttaggtactgtgcagtacttttcgccagaacaagcaaaaggtgaggcaacggatgaatgtacagatatttattctataggtattgtgttatatgaaatgcttgttggtgaaccaccctttaatggagaaactgcagttagcattgcgattaaacatattcaggattctgtgccaaatgtgacaacagatgtacgtaaggatattccgcaatctttaagtaatgtcattttacgcgctacagaaaaagacaaagcgaatcgttacaaaacaattcaagaaatgaaagatgatttgagtagtgttttacatgaaaatcgagcgaatgaagatgtctatgaactcgataaaatgaaaacgatagcggtacctttgaaaaaagaagatctagcaaagcatattagtgaacataagtcgaatcaacctaaacgtgaaacgacgcaagtacctattgtaaatgggcctgctcatcatcagcaattccaaaagccagaaggtacggtgtacgaaccaaaacctaaaaagaaatcaacacgaaagattgtgctcttatcactaatcttttcgttgttaatgattgcacttgtttcttttgtggcaatggcaatgtttggtaataaatacgaagagacacctgatgtaatcgggaaatctgtaaaagaagcagagcaaatattcaataaaaacaacctgaaattgggtaaaatttctagaagttatagtgataaatatcctgaaaatgaaattattaagacaactcctaatactggtgaacgtgttgaacgtggtgacagtgttgatgttgttatatcaaagggccctgaaaaggttaaaatgccaaatgtcattggtttacctaaggaggaagccttgcagaaattaaaatcgttaggtcttaaagatgttacgattgaaaaagtatataataatcaagcgccaaaaggatacattgcaaatcaaagtgtaaccgcaaatactgaaatcgctattcatgattctaatattaaactatatgaatctttaggcattaagcaagtttatgtagaagactttgaacataaatcctttagcaaagctaaaaaagccttagaagaaaaagggtttaaagttgaaagtaaggaagagtatagtgacgatattgatgagggtgatgtgatttctcaatctcctaaaggaaaatcagtagatgaggggtcaacgatttcatttgttgtttctaaaggtaaaaaaagtgactcatcagatgtcaaaacgacaactgaatcggtagatgtaccatacactggtaaaaatgataagtcacaaaaagttaaagtttatattaaagataaagataatgacggttcaactgaaaaaggtagtttcgatattactagtgatcaacgtatagacattcctttaagaattgaaaaaggaaaaacagcaagttatattgttaaagttgacggtaaaactgtagctgaaaaagaagtcagctatgatgatgtataaatataattgaagtaaatgtaccgaggtttctatttggaagtctcggtatttttatgttgagattgcggtagttttaaaatgcttcatgtcatcatatacaggtgagcattgtctatcaattctgtatcactctcacaatatttatatcatttgaaatgatcatttatatattaattttccagtctttgatataataaatgcagtaaaattaatcgagaggtgccattttgaagacaggtcgaatagtgaaatcaattagtggggtatatcaagtagacgttaatggcgaacgtttcaatacaaaaccacgaggattatttagaaagaaaaaattttcaccggtagttggtgatatagtggaatttgaagttcaaaacattaacgaaggttatattcatcaagtgtttgagcgggaaaatgagttgaaaagaccacctgtaagtaatatagatacactagtaattgtaatgagtgctgtcgagccaaatttttcaacgcaattattagatcgatttttagttattgcacattcgtatcagttaaatgcgagaattttggtgactaaaaaagataaaacaccaattgaaaagcagttcgaaataaatgagttgttgaaaatatatgaaaatattggctatgagactgaatttattggaaatgatgatgatcgaaaaaaattgtagaagcttggccagctggacttatagtacttagtggtcaatcaggtgtcggtaagtccactttcttaaatcattatcgtccagaacttaatcttgagacaaatgatatatcaaaatcattaaatcgaggaaagcatactacaagacatgtcgaactattcgaacgtcaaaacggttatattgcagacacacctggattcagtgctttagattttgatcatatagataaagatgaaataaaagattattttcttgaattaaatcgatatggtgaaacatgtaagtttaggaattgtaatcatatcaaagaacctaattgtaatgttaagcatcaattagagatagggaatattgcgcaatttagatacgaccattatttacaactatttaatgaaatttcaaatagaaaggttagatattaaatgacaaaactatatccatcattattatctgttgattttttggatttacaacatgaattaaaacgacttgaagaagcaggcgtcgacggagttcattttgatgttatggatggtcaatttgtgcctaatatatctattggtttaccaatattagatgcagtaagaaaaggcacaacattacctatagacgtacatttgatgattgaaaatccagaaaagtatattgcatcatttgcagaacatggtgccgatatgatttcaattcatgtcgaatcaacgcctcatattcatcgtgctattcaaatgattaaacatttagataaaaaagctggtgtagtaattaatcctggtacaccaatatcacaaattgaacctattttagacattgttgattatgtactagtgatgacagttaacccagggtttggtggtcaatcatttattgatcaatgcgtagaaaaaatagcgggtcttaatgctattaaaatggaacgtcaattaaactttgatattgaagttgatggaggcgtaaataccgatacagcgaaagtttgtgttgaaaatggtgctacaatgctagtaacaggttcatttttctttaaacaagaggattataaaaaagtcacacaagcattgaaaggttgagtgtatatgcatataaatttattatgttctgatcgacacttgccgcaagatatttgggccaaaagtaatgaaggtaaatggggcggcgttgatagaggtgctttgattttattgaagcatcaaattatcccttttttctcagtgggagactttgattcagtcagtaaagaagaacgccaacttctaacagaacagttacaaatcaaaccagttcaagctgaaaaagctgatacggatttagctttagcggttgataaagctgttgcacttggatttgatagtattacaatttatggtgcaacaggcggacgattagatcacttttttggggcaattcagttattattgaaaaaagcatattataaacatgatgttcatatagaagttatcgatcaacaaaataaaattgaattattgcctaaaggtcaacatacagttgaaaaagataagagttatccgtacatttcatttataccgatgactgatgatgtagaactttctctagcaggttttaaatataatttagctagacaaatgcttaatataggttctactttaactatttcaaatgaaattgagtctttgcaagcgaaagtaactgtacatgatgggttgattttgcaaattagaagtacagatttaaattaagtatattcaaatttgtgaggatttttaataaagtgcatgagttatttaataaagtgacgtttatagatagaatttataacataataatagatgaatcacgctgtaattaatgaagattatggcgtgatttattattgaaaggaaaattgtaggtcctagtacattgatttatgtgccaaaatcgatattgaacccataagtccaatttgacagagaaccattattaaacgtattaaccaaattatattgatagttcgaatttcactatgaaccattatgtattgtttggtaacaaaaaaagaactaagaggttgagctcttagttcttaagtaaatgtgtcctccacataaggtcacattttttatgtgcaatatatttattaaactctagttactttaccagattttaaagcacgtgcagaaacccaaacttttttaggtttaccgtcaactaggattctaactttttgaaggttagcgttccatctacgtttagtagagtttaaagcgtgtgaacgtctgttaccagtcgaagctttacgacctgttacgaaacattgtttacccatatgagtacctcctttaataaatataaatacacataactacttatatacttaattaagatagcatagtttcatttgaaaaacaatgaataattttcacataaaagtcaaaaatactgagttttgtgatataattgtagactgtgaagttatgtagtatgatattttagagaaataagtgaatgaaacatttaaaatttttatttaatgatactacatctattaaaagaaaacgcctatagataatcgtcatgagtgtaaattcagtttactcaaaatataataggtgatttaagcgtaagtcattctgataagttgtaccattgatattttataaaaataatcaatgaaacttaaagcgtttatgactacactaagtggtaaaattttaaaagtgattagggaaaacgaataataaactttgaaatttaggagggacaaagatatgacattagagatttcaaatgattacggtaaaattgatatttcaaacgaagtgattgcttcggttgtaggtggaaaggccgttgaatgttatggtattgtaggtatggcatctagacaacaagttagagatggtattgcggaaatactaggacatgaaaattatgctaaaggcatcaaagtaactgaaaataatggcgtagtggatatagatatgtacattattgtaagttacggtgtgaaaatatctgaagttgccaataatgtacaatcaacagtgaaatatactttggaaaaatcacttaatgtatcagtaaattcaatcaatatatatgtacaaggtgtacgtgtgaataatacaggcaagaaagcttaggaggacaacttgaaatgattagcaaaattaatggtaaattatttgccgatatgattatacaaggggcacaaaatttatctaacaatgcagatttggtagattctttgaatgtgtatccagtgccagatggtgatacaggaacaaatatgaatcttactatgacttcaggtcgcgaagaagtagagaataatttgtcgaaaaatatcggcgaattaggtaaaacattctcgaaaggtttactaatgggtgcaagaggtaactctggtgtcatcttgtcacaattattcagaggattttgtaaaaatattgaaagtgaatctgaaattaattcaaaattgttagctgaaagttttcaagctggtgttgaaacggcatataaagctgttatgaaaccagttgaaggtacaatacttacagttgcaaaagatgctgcgcaagctgcaatagaaaaagcaaataatactgaagattgtatagaattaatggagtacattattgtaaaagccaatgaatcacttgaaaacacaccaaacttattagctgtacttaaagaagttggtgttgttgatagtggcggtaaaggtttgttatgcgtttacgaaggattcttaaaagcgcttaaaggtgaaaaagttgaagccaaagttgcaaagatagataaagatgaatttgtacatgatgaacatgatttccatggtgtaattaatactgaagatattatttatggctattgtactgaaatgatggttcgttttggaaagaataaaaaagcctttgatgaacaagaattcaggcaagatatgagtcaatttggtgattctttattagtcattaatgatgaagaaattgtgaaagttcacgtgcataccgaatacccaggtaaagtgtttaattatggtcaacaatatggtgaattaattaaacttaaggttgaaaatatgagagaacagcaccgtgaagtgattcgaaaagaacagcacacagctaaaccgaaaatggaaacggttgaaacagcaattattactatttctatgggtgaaggtatttcagagatatttaaatcaatgggtgccacacatatcattagtggtggacaaacgatgaatccttctacagaagatatcgttaaagtcattgaacaatcaaaatgtaaacgtgcaattattttaccgaataataaaaatatcttaatggcaagtgaacaagcagcgagtattgttgatgcagaagctgttgttattccaacgaaatctattcctcaaggtataagcgcactattccaatatgatgtggacgcaacacttgaagaaaataaagcgcaaatggctgattcagtaaataacgttaaatctggttcattaacgtacgctgttcgtgatacgaaaattgatggcgttgagattaaaaaagacgcgtttatgggcttgattgaagataagattgtaagcagccaaagtgatcaattaacaacggttactgagttgttaaatgagatgttagcagaagatagtgaaatattgactgtgattattggtcaagatgcagagcaagcagttacagataacatgataaactggatcgaagagcaatatccagatgtagaagtggaagttcatgaaggtggacaaccaatttatcaatatttcttttcagtagaataaaaatttaaaataaaaaactaccaatgataaatcatcagttggtagttttttattttgctattttagtgatattgcgggttaaaagtatcgttctcgagttgctaacaatgtcatgttcaacttagtcatgataaaataaataacatactaaatgatacgtaaaatcaaataaaacataggtgatttattttggctaaagtaaacttaatagaaagtccatattctcttttacaattaaaaggtataggtcctaagaaaatagaagtattgcaacaactaaatattcatacagtggaagatcttgttctttatttgccaactagatatgaagataatacagtgattgatttgaatcaagcagaagatcaatctaacgttacgatagaaggacaagtatatacagctccagtagttgcattttttggaagaaataaatcaaaattaaccgttcatttaatggtaaataatattgctgtcaaatgtatttttttcaatcaaccgtatttaaaaaagaaaatcgaattaaatcaaactataactgttaaaggtaagtggaatagggttaaacaggaaattactggtaatagggttttctttaattcacaagggacacaaactcaagaaaacgcagatgttcaattagaaccagtctatcgtattaaggaaggtattaaacaaaagcaaatacgagaccaaattagacaagcgttaaatgatgtgacaattcatgaatggttaactgatgaactaagagaaaaatataaattagagaccttggactttactttgaacacattacatcatcctaaaagtaaagaggatttattacgtgctcgtagaacctatgcatttactgaactgtttttattcgaattacgtatgcaatggctaaatagattagaaaagtcatctgacgaagcaattgaaattgattatgacatagaccaagttaaatcatttattgatcgtttaccttttgaactaactgaagcacagaaatccagtgttaatgaaatttttagagatttaaaagcaccaatacgtatgcatcgattacttcaaggtgatgtaggttcaggaaaaacagtagttgctgcaatttgtatgtatgcgttaaaaactgctggttatcaatcagcattgatggtaccaactgaaattttagcagagcaacatgctgaaagtttaatggctttatttggagattctatgaacgttgcattgttaactgggtcagtaaaaggtaagaaacgaaagatacttttagaacaacttgaaaatggtacgattgattgtttaattggaacccatgctttgattcaagatgatgtgattttccataatgttggtttagtaattacagatgaacaacatcgatttggtgtgaatcaacgccagcttttaagagaaaaaggtgcaatgacgaatgtgttatttatgacagcaacgccgataccaagaacactagcaatatcagtttttggtgagatggatgtgtcttcaattaaacaattaccaaaaggtcgtaaacctatcattactacttgggcaaagcatgagcaatacgataaagttttgatgcaaatgacctcagagttgaaaaaaggtcgtcaagcatatgtcatttgcccgctaatagaaagttctgagcatctcgaagatgttcaaaatgttgtcgcattgtacgagtctttacaacagtattatggtgtttcccgtgtagggttattgcatggtaagttatctgccgatgaaaaagatgaggtcatgcaaaagtttagtaatcatgagataaatgttttagtttctactactgttgttgaagtaggtgttaatgtaccgaatgcaacttttatgatgatttatgatgcggatcgctttggattatcaactttacatcagttacgcggtcgtgtaggtagaagtgaccagcaaagttactgtgttttaattgcatcccctaaaacagaaacaggaattgaaagaatgacaattatgacacaaacaacggatggatttgaattgagtgaacgagacttagaaatgcgtggtcctggagatttctttggtgttaaacaaagtggattgccagatttcttagttgccaatttagttgaagattatcgtatgttagaagttgctcgtgatgaagcagctgaacttattcaatctggcgtattctttgaaaatacgtatcaacatttacgtcattttgttgaagaaaatttattacatcgtagttttgactaattgccatgctgatttgtcaatttgagtgcaacacttcgttaattgagtgatatgacacttgaactatttaaatgtaaagtggtattttaacaatttataaattttcgactaaataatagctaaatattacagttatttgttgagtcggttaaatagaaagtgttatgatatgtgaggaatgtttaagactaggtactaaaaaatgaggggtgagacgttgaaactaaagaaagataaacgtagagaagcaatcagacaacaaattgatagcaatcccttcatcacagaccatgaactaagcgacttatttcaagtgagtatacaaacaattcgtttagatcgcacttatttaaacataccagaattaaggaagcgtattaaattagttgctgaaaagaattatgaccaaataagttctattgaagaacaagaatttattggtgatttgattcaagtcaatccaaatgttaaagcgcaatcaattttagatattacatcggattctgtttttcataaaactggaattgcgcgtggtcatgtgctgtttgctcaggcaaattcgttatgtgttgcgctaattaagcaaccaacagttttaactcatgagagtagcattcaatttattgaaaaagtaaaattaaatgatacggtaagagcagaagcacgagttgtaaatcaaactgcaaaacattattacgtcgaagtaaagtcatatgttaaacatacattagttttcaaaggaaattttaaaatgttttatgataagcgaggataaaattatggttaaattagcaattgatatgatgggtggcgacaatgcgcctgatatcgtattagaagccgtacaaaaggctgttgaagactttaaagatctagaaattatacttttcggtgacgaaaaaaagtataatctgaaccatgaacgaatcgaatttagacattgttctgaaaagattgaaatggaagatgagcctgttagagcgattaaacgtaaaaaagatagctcaatggtaaaaatggctgaagctgtgaaatctggtgaagcagatggatgtgtgtcagcaggtaatactggtgctttaatgtcagctggtttattcattgttggacgtattaaaggtgtagctagaccggctttagtagtaacattgccaacgattgatggaaaaggttttgtctttttagacgttggtgcaaatgctgatgctaaacctgaacacttattacagtatgcgcaactaggggatatttatgctcaaaaaattagaggtattgataatccgaaaatctcattattaaatataggaaccgagccagctaaaggtaatagtttaacgaaaaaatcatatgagttattaaatcatgatcattcattgaattttgttgggaatattgaagcgaagacattaatggatggcgatacagatgttgtagttaccgatggctatactgggaacatggtccttaaaaatttagaaggtactgcaaaatcaatcggtaaaatgttaaaagatacgattatgagtagtactaaaaataaattagcaggtgcaatattgaagaaagatttagctgaattcgctaaaaagatggattactcagaatacggtggttccgtattattaggattggaaggtactgtagttaaagcacacggtagttcaaatgctaaagctttttattctgcaattagacaagcgaaaatcgcaggagaacaaaatattgtacaaacaatgaaagagactgtaggtgaatcaaatgagtaaaacagcaattatttttccgggacaaggtgcccaaaaagttggtatggcgcaagatttgtttaacaacaatgatcaagcaactgaaattttaacttcagcagcgaacacattagactttgatattttagagacaatgtttactgatgaagaaggtaaattgggtgaaactgaaaacacacaaccagctttattgacgcatagttcggcattattagcagcgctaaaaaatttgaatcctgattttactatggggcatagtttaggtgaatattcaagtttagttgcagctgacgtattatcatttgaagatgcagttaaaattgttagaaaacgtggtcaattaatggcgcaagcatttcctactggtgtaggaagcatggctgcagtattgggattagattttgataaagtcgatgaaatttgtaagtcattatcatctgatgacaaaataattgaaccagcaaacattaattgcccaggtcaaattgttgtttcaggtcacaaagctttaattgatgagctagtagaaaaaggtaaatcattaggtgcaaaacgtgtcatgcctttagcagtatctggaccattccattcatcgctaatgaaagtgattgaagaagatttttcaagttacattaatcaatttgaatggcgtgatgctaagtttcctgtagttcaaaatgtaaatgcgcaaggtgaaactgacaaagaagtaattaaatctaatatggtcaagcaattatattcaccagtacaattcattaactcaacagaatggctaatagaccaaggtgttgatcattttattgaaattggtcctggaaaagttttatctggcttaattaaaaaaataaatagagatgttaagttaacatcaattcaaactttagaagatgtgaaaggatggaatgaaaatgactaagagtgctttagtaacaggtgcatcaagaggaattggacgtagtattgcgttacaattagcagaagaaggatataatgtagcagtaaactatgcaggcagcaaagagaaagctgaagcagtagtcgaagaaatcaaagctaaaggtgttgacagttttgcgattcaagcaaatgttgccgatgctgatgaagttaaagcaatgattaaagaagtagttagccaatttggttctttagatgttttagtaaataatgcaggtattactcgcgataatttattaatgcgtatgaaagaacaagagtgggatgatgttattgacacaaacttaaaaggtgtatttaactgtatccaaaaagcaacaccacaaatgttaagacaacgtagtggtgctatcatcaatttatcaagtgttgttggagcagtaggtaatccgggacaagcaaactatgttgcaacaaaagcaggtgttattggtttaactaaatctgcggcgcgtgaattagcatctcgtggtatcactgtaaatgcagttgcacctggttttattgtttctgatatgacagatgctttaagtgatgagcttaaagaacaaatgttgactcaaattccgttagcacgttttggtcaagacacagatattgctaatacagtagcgttcttagcatcagacaaagcaaaatatattacaggtcaaacaatccatgtaaatggtggaatgtacatgtaatatatttgagctaaagctcattgacgcagtggttgactggtcatccaatggagaattgtctgacctagtcaactttgcgggggaaattctaagcaacctagataaggttccagaatttctccctaagaaacactaatcaataaattgataagtgtttctaaaatttctacttgttttttagaatttaaaatgggaaaatatagtagtctatgtataggcatttttaaaggaggtgaatcgacgtggaaaatttcgataaagtaaaagatatcatcgttgaccgtttaggtgtagacgctgataaagtaactgaagatgcatctttcaaagatgatttaggcgctgactcacttgatatcgctgaattagtaatggaattagaagacgagtttggtactgaaattcctgatgaagaagctgaaaaaatcaacactgttggtgatgctgttaaatttattaacagtcttgaaaaataataaatcttacatctgggtcgtcagtattgtcgactcagtttttttctttaattatcaatagttttaacgtaaaattaaagatgattcaagagcaacacataaaggagataaaataatgtctaaacaaaagaaaagtgagatagttaatcgttttagaaagcgctttgatactaaaatgacagagttaggctttacttatcaaaatattgatttataccaacaagcattttcgcattcgagttttattaatgattttaatatgaatcgtttagaccataatgagcgtttagagtttttgggtgatgcggtattagaattgacggtttcacgatatttatttgataaacatcccaacttgccagaagggaatttaacaaaaatgcgtgccactattgtatgtgagccctcacttgtaatatttgcgaataaaattggattgaacgaaatgattttacttggtaaaggtgaagagaaaacagggggacgtacaagaccatcattaatatcagatgcattcgaagcatttattggggcattgtatttggatcaaggactagatatagtttggaaatttgctgagaaagtcattttcccacatgtagaacaaaatgagttattaggcgtggtagattttaaaacacaattccaagaatatgtgcaccagcaaaataaaggtgatgtaacctataatttaataaaagaagagggaccggcacatcatcgtctattcacttcagaagttattctgcaaggggaagcaatagctgaaggtaaagggaaaacgaaaaaagaatcagaacaacgtgctgctgaaagtgcctataagcaattaaaacaaattaaatagaaatttatatgatacgacatataggtgttcgatttaggatttaaggaagaatttttaatattttatggaacaacttcgaaatttaatatacaaatactaaaatatcgtatacatgtgttctttaaaattgtgataaggagtttaggatggtttatttaaaatcaatagatgccattggatttaagtcttttgcagatcaaaccaatgttcaattcgataaaggtgtaactgcaattgttggtccaaatggaagcggtaaaagtaatattacagatgctattaaatgggtgttgggtgaacaatcggctaaatcattacgtggctcaaaaatggaagatattatcttctcaggtgcagaacatcgcaaagctcaaaattatgctgaagtacagttaagattagataatcattctaaaaagctcagtgttgatgaaaacgaagttattgtaacaagaagattgtatcgaagtggtgaaagtgagtactacataaataatgaccgtgcaagattaaaagatattgccgatttatttttagattctggattgggaaaagaagcgtatagcattatctcgcaaggtagagttgatgaaatactaaatgctaaaccaattgatagacgtcaaattattgaagaatcggctggtgtacttaaatataaaaaacgtaaggctgaatcattaaataaacttgaccaaacagaagataatttaacgagagtagaagacattttatatgatttggaaggtcgcgtagaacctctaaaagaggaggcagctatagctaaagaatataagacactttcacatcaaatgaaacatagtgacattgtagttacagtgcacgatattgatcaatatacaaatgacaatagacaattagatcaacgtttaaatgatttacaaggccaacaagcaaataaagaagctgacaagcaacgtttaagccaacaaattcaacaatataaaggtaaacgtcatcaacttgataatgatgttgaatcgcttaattatcaattagtaaaagctacggaagcctttgaaaaatatacgggacaattaaatgttttggaagaacgtaagaaaaatcaatctgaaacaaatgcacgatatgaagaagaacaagaaaatttaatggagcttttagaaaatatatcaaatgagatttctgaagctcaagatacttataagtctctgaaaagtaaacaaaaagaactcaatgctgtcattcgtgaacttgaagaacaactatatgtttcagacgaagcacatgatgaaaaattggaagaaattaaaaacgaatactatacattaatgtcagagcaatcagatgttaacaatgatattcgttttttaaagcatactatagaagagaatgaggctaaaaaatcaagactagattctcgattagttgaagtttttgagcaattgaaagatattcagggtcaaataaaaacgacaaaaaaagaatatcaacagaccaacaaagaactttctgctgtagataaagaaattaaaaatatagaaaaagacctcactgatacaaaaaaagcacaaaatgaatacgaagagaaattgtatcaagcatatcgatataccgaaaaaatgaaaacacgtattgatagtttggcaacgcaagaggaagaatatacttattttttcaatggcgtcaaacatattttgaaagctaaaaataaagaattaaagggtatttatggtgcagttgcggaaattattgatgtgccatctaaattaactcaggcaattgaaacagcattaggtgcttcattacaacatgtcattgtagattcagaaaaagatggacgccaggctattcaatttttaaaagaacgtaatttaggtcgtgcgacgtttttaccattaaatgttatacagagtagagtggtagcgactgatattaaatctattgctaaagaggcaaacggatttattagtatcgcttcggaagcagttaaagtagcaccagaatatcaaaatattatcgggaatttattaggtaatacgattatcgttgatcatttaaagcatgcaaatgaattggcacgtgcgattaaatatcgaactcgtattgttactttggaaggtgatattgtaaatcctggtggttctatgactggtggtggcgctcgtaagtcaaaaagtattctgtctcaaaaagacgagttgacaacaatgagacaccaattagaagattacttgcgtcaaacagaatcatttgaacaacaatttaaagagttgaagataaaaagtgatcaattaagtgaactgtattttgaaaaaagtcaaaagcataatacacttaaagagcaagtgcatcattttgaaatggagctcgatagattaactacacaagaaacacaaataaaaaatgatcatgaagaattcgaatttgaaaaaaatgatggttatacgagtgacaaaagtcgacaaactttgagtgaaaaagaaacttatctagaaagtattaaagcatctttaaaacgactagaagatgaaattgaacgctacacaaaactttctaaagaaggtaaggaaagcgttactaaaacacaacaaaccttacatcagaaacaatctgatcttgctgtggttaaagagcgtattaaaacacaacaacagacaatagatcgattaaataatcaaaatcaacaaactaaacatcaattaaaagatgttaaagaaaaaattgcattctttaattcggatgaagtgatgggcgaacaagcttttcaaaatattaaagatcaaattaatggtcaacaagaaacgagaacacgcttatcagatgaattagataaattgaaacaacaacgtattgagttgaatgaacaaatcgatgcgcaagaagctaaactacaagtttgtcaccaagatattttagctatcgaaaatcactaccaagatattaaagctgaacaatcaaagctagatgtattaattcatcatgcgatagatcatttaaatgatgaatatcaattgactgttgaacgtgcgaaatctgaatatacgagtgatgaatcgattgacgcattacgtaaaaaagttaagttaatgaagatgtcgattgatgaactaggtcctgtaaacttaaatgcaattgaacaatttgaagagttaaatgaacgttatacatttttaagtgaacaacgtacagatcttcgtaaagctaaagaaacattagagcaaattataagtgaaatggatcaagaggttactgaaagatttaaagaaactttccatgctattcaaggacattttacagctgtgttcaaacaattgtttggtggaggcgatgcagaattgcaattaactgaagccgattatttaacagctggtattgatattgtggtacaaccaccgggtaaaaagttgcaacatttatcgttactgagtggtggtgagcgtgcattaactgctattgctttactatttgcaattttaaaagtaagatctgcaccttttgttatattagatgaggttgaagctgcactagatgaagcaaatgttattagatacgcaaaatatttaaatgagttatcagacgaaacacaattcattgttattacacaccgtaaaggaacaatggaatttgcagataggttatacggtgtaacaatgcaagaatcaggtgttactaaacttgtgagtgtgaatttaaatacaatagatgatgtgttgaaggaggaacaataatgagcttttttaaacgcttaaaagataagtttgcaacaaataaagaaaatgaagaagttaaatccttaacagaagaacaaggtcaagacaaattagaagatacacattctgaaggttcaacgcaggacgcaaatgatttagcagaaaatgctgaagtgaaaaagaagccacgcaagttgagtgaagcggattttgatgacgatggcttaatatcaattgaagattttgaagaaattgaagctcaaaaaatgggtgctaaatttaaagcaggactcgaaaaatctcgtcaaaatttccaagaacaattaaataatttgatagcgagatatcgtaaagtagatgaagacttttttgaagctttagaagaaatgttaatcactgcagacgtcggttttaatacagtgatgacgttaactgaagaattacgtatggaagcacaacgacgtaatattcaagatactgaagatttgcgtgaagtcattgttgaaaagatcgtagagatttaccatcaagaagatgataattcagaagctatgaacttagaagatggtcgtttaaatgtcattttaatggttggtgtgaatggtgttggtaaaacaacaacaattggaaaattagcttaccgatataaaatggaaggtaaaaaagtaatgttagctgcgggcgatacttttagagcgggtgctattgatcaattgaaagtttggggcgaacgtgttggtgtagacgtaattagccaaagtgaaggttctgatccagctgctgttatgtatgatgcgattaatgccgctaaaaacaaaggtgttgatattttaatctgtgataccgctggacgtttacaaaataaaacaaatctaatgcaagaattagaaaaagttaagcgtgtaattaatcgagcagtgccagatgcgcctcatgaagcattactatgtttagatgctacaactggtcagaatgcgttgtcacaagctagaaactttaaagaagtaacaaatgttacaggtattgtattaacgaaattagatggtacagccaaaggtggtatcgtattagccattcgtaatgaattgcacatcccagttaaatatgtaggtttaggtgagcaattagatgacttacaaccatttaaccctgaaagttatgtctacggcttattcgctgatatgattgaacaaaatgaagaaataacaacagttgaaaatgatcaaattgtaacagaagaaaaggacgataatcatgggtcaaaatgatttagttaaaacgttacgaatgaattatttgtttgatttttatcaatccttattgacgaataaacaacgtaattatttggaattattttatcttgaagattattctttaagtgaaatcgcagatacttttaatgtgagtagacaagcagtttatgataatataagaagaactggcgatttagttgaagattatgaaaagaaattggaattataccagaaatttgagcaacgccgagaaatatatgatgaaatgaaacaacatttaagtaatccagaacaaatacaacgttatattcaacaattagaagacttagaatagatataaattgagggaggacatcgatatggcatttgaagggttatcagaacgcttgcaagcgacgatgcaaaaaatgcgtggtaagggtaaacttactgaagctgatataaagataatgatgcgtgaagtaagattagcgttacttgaggctgacgtaaactttaaagtggtaaaagaatttattaaaacagtatcagaacgcgcattaggttccgatgtaatgcaatcattaacaccagggcaacaagttattaaaatagttcaagatgaattaacgcagttgatgggtggagaaaatacgtcgattaatatgtcaaataaaccacctactgttgttatgatggttggtttacaaggtgctggtaaaacaacaactgcaggtaaattagcattattgatgcgtaaaaaatacaacaaaaaacctatgttagttgcagcagatatttatcgtccagcagcgataaatcaattacaaacagtagggaaacaaattgatattcctgtatacagtgaaggagatcaagtaaagccacaacaaattgtaactaatgcattaaaacatgctaaagaagaacatttagactttgtaatcattgatacagcaggtcgattacacatcgatgaagcattgatgaacgaattaaaagaagtaaaagacattgctaaaccaaacgaaattatgttagttgtcgattcaatgacgggtcaagatgctgtcaatgttgcagaatcttttgacgatcaacttgatgtcacaggtgttaccttaactaaattagatggtgatacacgtggtggtgcagctttatctattcgttcggtgacacaaaaaccaattaaatttgttggtatgagtgaaaagttagatggtttagagctattccatcctgaacgtatggcatcacgtattttaggtatgggtgatgtgttaagtttaattgaaaaagcgcaacaagatgtggatcaagaaaaagcaaaagatttagagaaaaagatgcgtgagtcatcgtttactttagatgattttttagaacaacttgatcaggtgaaaaatctaggaccactggatgatattatgaaaatgattccaggtatgaataaaatgaaagggctagataagcttaatatgagtgaaaagcaaattgatcatattaaagcgattatccagtcaatgacgccggctgaaagaaacaatccagacacattgaatgtatcacgtaaaaagcgtattgctaaagggtctggtcgttcattacaagaagtcaatcgtttgatgaaacaatttaacgatatgaagaaaatgatgaaacagttcactggtggcggtaaaggtaaaaaaggtaaacgcaatcaaatgcaaaatatgttaaaaggtatgaatttaccgttttaatgtttaatataacacgctgatttttgttgcaatgagatgtgcatcccgaaagttatactaaagaatataactttatggggtgcatatttttagatacacaataataattaaaaactgaaattgctgatttgctagaacatgaggttattgttgctaatattaataagttatattgggggaacgtgtgcggtagaagtggtaccattcatgtccttacgagataaattaacttaacacgtaggtggtgaaatttactatgaatttttataacctattaacagtctaatttagtaatcacatagttattattgtaagaaaaaggttcaataattttcctggtaaagaaaaaactctttacaaacattcatacacctgttaatattatttcttgtagaaaataaaaattaaaacatgacttaaaggagattttataaatggcagttaaaattcgtttaacacgtttaggttcaaaaagaaatccattctatcgtatcgtagtagcagatgctcgttctccacgtgacggacgtatcatcgaacaaatcggtacttataacccaacgagcgctaatgctccagaaattaaagttgacgaagcgttagctttaaaatggttaaatgatggtgcgaaaccaactgatacagttcacaatatcttatcaaaagaaggtattatgaaaaaatttgacgaacaaaagaaagctaagtaatttagcgtaaaattgttctaacaataagaataactcgtttacactgacagttattactcaatgatacgttgggaatatcacatgttagtaatatagaacgtattgggtaccataatggtgccctttttctttgaattattttcaattaaaatagaagtgttcaaagcatagagttggaggtaatagaatgagagttgaagttggtcaaattgttaacacacatggtattaaaggtgaaattaaagtaaaatccaattcagactttacagacgttcgttttcaacccggtcaagtgctgacagttgtgcataacaataacgaccttgaatatactgttaagtcacatagagtgcataaagggcttcatatgcttacatttgaaggtattaataatattaatgatattgagcatttaaaagggagttctatttatcaagagcgtgatcatgaagatatcgtacttgaggaaaatgaattttattattcagatattataggatgtacagtttttgatgatcaagaaacaccaataggtcgtgtaattaatatatttgaaacaggtgcgaatgatgtgtgggtgattaaaggatctaaagaatatttgattccttatattgctgatgttgtaaaagaagtggatgttgaaaataaaaaaattatcatcacgccaatggaaggattgttggattaatgaaaattgattatttaactttatttcctgaaatgtttgatggtgttttaaatcattcaattatgaaacgtgcccaagaaaacaataaattacaaatcaatacggttaattttagagattatgcaattaacaagcacaaccaagtagatgattatccgtatggtggcggacaaggtatggtgttaaagcctgaacctgtttttaatgcgatggaagacttagatgtcacagaacaaacacgcgttattttaatgtgtccacaaggcgagccattttcacatcagaaagctgttgaattaagcaaggccgaccacatcgttttcatatgcggacattatgaaggttacgatgaacgtatccgaacacatcttgtcacagatgaaatatcaatgggtgactatgttttaactggtggagaattgccagcgatgaccatgactgatgctattgttagactgattccaggtgttttaggtaatgaacagtcacatcaagacgattcattttcagatgggttattagagtttccgcaatatacacgtccgcgtgaatttaagggtctaacagttccagatgttttattgtctggaaatcatgccaatattgatgcatggagacatgagcaaaagttgatccgcacatataataaaagacctgacttaattgaaaaatatccattaactaatgcagataagcaaatattagaaagatataaaataggattgaaaaaaggttagtattgtgctaacataatctgagtgtggaaacactaaaatcactatgatccgctgctatatatttgtcgaggcaagaacataggttgaagaggagaatttataatgacaaatcacaaattaatcgaagcagtaactaaatcacaattacgtacagacttaccaagtttccgtcctggtgatactttacgtgtacacgtacgtatcattgagggtactcgtgagcgtatccaagtattcgaaggcgttgtaattaaacgtcgtggcggtggcgtttctgaaacgtttacagttcgtaaaatttcatcaggtgttggcgtggaacgtacattcccattacacacaccaaaaattgaaaaaatcgaagttaaacgtcgtggtaaagtacgtcgtgctaaattatattacttacgtagtttacgtggtaaagctgctagaatccaagaaattcgttaatcagcatttaaacaaagctatgtatgagtcaaattcgactcaaacaataaagccatctaggtcacttttatggagtgatatagatggctttttttgctgtttagttaatgtaaagttgataatgtaattgtttattccttctctattcataacgtgtttgctcaaaatggttatataaacaaaaatctactaagtgccattgaaaaggacttagtagatttattaaatatatgcgtagcaacattatttttgtcttgcccatctcgtgaaaataatactacatataatgccaaatatagtaattgttataagtaaataatagtatggtggggtatagctcaattgaatctttgttatatttttaggtgctttaatgccggtcataacaccatttacttgttcaactttaagactttgatcacctgatgtcgctttcataccttgattatatgctgttggcaaaacaatatacccagatgaatttttatttttagtaatagtataaccatgctttgtcttactaactttgacagcttctaatgaatttgaagcgtctttaagcgtggtataatcttcgccgtatatcccttttaaatttactcgatacttacctttaggcaatgataatctaattctatctggagctttaatgcgtatcgttacgggtgttacaacgcgtcgatatttataagtgagtttatttctttcttgtgtatattcattcactttaacatcatgagctttatccggcgaaagtaattctaaatccatttcaaaatacaaatctttaaattgattagaaactgattttggcaactgtacagttagaccaccattattttgtttaacttgtaataaatgttttgtaggagattgccaggctgcactatttaatttaattgttgaatctgatagtaaatttttattggctttaaaatgtgtattaacatctttaatattgttagaaacaatcccttgcaacattgcttgttctttatctaatggagattttaattctttattggaaaagaccttatttgtaatatgtgcacttggataatggatggtatttttagaatgaatccaacgaactttattgtctttgtgttcagacttaattttaaatccatatggtaagttgtcatcatgattcactctaattcgatcattaacattccaaagtgatagtaaattttgacgattgccaagtaatctataagtgctgtttttatcgattggcatattaatttggagtgtcttgtcataatattttaaaatgtctccattaaaaatactagaatataatgaaatgccattataatgatatataaatggtgaatttaatgcatagtctgacatataatcaatgcgattaaatgagcctgttgcattttgatttatcttttttataagctggtttacatagttactatggtaatcatgttgtttcaacgttgataatgattgttgataaggtttgattgccatgtttttgttgttatctaaaatgacgatttgttgaatcataacgattaatactaatattgcaacggttaattttttataacgccataaactaaattttaaaataacggcaagcactattagcaggataatacctactataagtgcaagtgggtgtgtcggtgatagtaatacataaagtattgcgatgatgcatacgggtattgttctgattaaataatatttcatatttaatgttgataaatgttgaataaacaatccgcaaagagcacttgatgatagtgctaagatatacacccaacgcctttctggaaatgaaaaaccattaaaagcactgtcgaaatactgtgataatgaacctataaataatatccatgttactattgcgaaaagtctataaaagtaaaaacgatacagtttgaatgacaataatgcaacgatagtaagaattgaaatcgtaatataaaatccatcgctaaagaaaaaataatgataatcaagtggtgtcaaaaacggtatatcaacattgggattttgctttctgtcattttccaaaaacgcagaaatgccagtgaataaaccaaatacacttgataacacactcaaaactgtagcagatatgacgcaaattaatttttgtgttctagagacaatgtcatatttgtaagtgaaaatgagtcgatataaatagtagcaacctataataatagcttgataataactgaaataaaaattgctaaatagtgttaaggctatcgcaacaatgaaaataccgattttgcgttgttgaaaatatctttccaaaccaagaatcgataatggcaataaatataataaatttccataaaatgaccaagtaaaattaaagtatataacgacagttgacatgccgtataaaatcgtagcgatcatatttgctgagcgtttaaagtgtaatattttaaataagtagaaggtcacgacaaatgttatgatagctcgtatcatagccataataagttggtttgtcggccaaaaatgtattgtcgtcggattaaatataccaaccgtttctcctattttaatgaatagaaaatttagccacattaaaggtgacagcgaataataatatgatagtcctttcatataatcgccacctaatccaaacgatgcatcatataaactagaaaaactacgtagatgttcatacaaatacatttgaaatggcatcatttgacggaatccatctccagccccgctaaaaacagtaccattcacaatataatcatagatatgagtagaaaataaaataagcgttaatattacactaatgaaagttataacaaagaattgtttgacgtttgaatttagccacttttttaacacaacattatcctcaactttcaaatttaaaattaagtttaactgaaactaaagttaatgaggttcttgataggtaaagacgaagatgactgtggaacagataccttatcatagttacttaaactttggatcattttcagtttatcattaaacaaatatattgaataataaaaatgtcatactgataaagatgaatgtcacttaataagtaacttagatttaacaaatgatgatttttaattgtagaaaacttgaaataatcacttatacctaaatctaaagcattgttaagaagtgtgacaatgttaaaataaatatagttgaattaatgaatttgttctataattaacaggttatagattttaataatgagaaaagaattgacgaaagtaaggtgaattgaatggttattcaatggtatccaggacatatggcgaaagccaaaagagaagtaagtgaacaattaaaaaaagtagatgtagtgtttgaactagtagatgcaagaattccatatagttcaagaaaccctatgatagatgaagttattaaccaaaaaccacgtgttgttatattaaataaaaaagatatgtctaatttaaatgagatgtcaaaatgggaacaattttttattgataaaggatactatcctgtatcagtggatgctaagcacggtaaaaatttaaagaaagtggaagctgcagcaattaaggcgactgctgaaaaatttgaacgcgaaaaagcgaaaggacttaaacctagagcgataagagcaatgatcgttggaattccaaatgttggtaaatccacattaataaataaactggcaaagcgtagtattgcgcagactggtaataaaccaggtgtgaccaaacaacaacaatggattaaagttggtaatgcattacaactattagacacaccagggatactttggcctaaatttgaagatgaagaagtcggtaagaagttgagtttaactggtgcgataaaagatagtattgtgcacttagatgaagttgccatctatggattaaactttttaattcaaaatgatttagcgcgattaaagtcacattataatattgaagttcctgaagatgcagaaatcatagcgtggtttgatgcgatagggaaaaaacgtggcttaattcgacgtggtaatgaaattgattacgaagcagtcattgaactgattatttatgatattcgaaatgctaaaataggaaattattgttttgatatttttaaagatatgactgaggaattagcaaatgacgctaacaattaaagaagttacgcagttgattaatgcggttaatacaatagaagaattagaaaatcatgaatgctttttagatgagcgaaaaggtgttcaaaatgccatagctaggcgcagaaaagcgttagaaaaagaacaagctttaaaagaaaagtatgttgaaatgacttactttgaaaatgaaatattaaaagagcatcctaatgctattatttgtgggattgatgaagttggaagaggacctttagcaggtccagtcgttgcatgcgcaacaattttaaattcaaatcacaattatttgggccttgatgactcgaaaaaagtacctgttacgaaacgtctagaattaaatgaagcactaaaaaatgaagttactgcttttgcatatgggatcgcgacagctgaagaaatagatgaatttaatatttataaagctactcaaatcgccatgcagcgagctattgatggattatcagtacaaccaacgcatttattgatagacgcgatgacgcttgataatgcactgcctcaagtatctttaatcaagggtgatgcaagaagtgtgtccattgcagctgcaagtatcatggcaaaggtttttcgtgatgattatatgacacagttatctaaagattatcctgaatatggttttgaaaaaaacgcgggttacggtaccaaacaacatttactagcaatcgatgatattggcattatgaaagagcatagaaaaagctttgaacctataaaatcgttactgtaaatcgtaaaattcaattaaatgataaaaaagtagcatttaagtttacaatagcgcttacattttttataattgtaagggaacttaacctaagtaacaggaggatggaagatgaatatccacgagtatcaaggtaaagaaatatttcgttcaatgggcgttgcagttccagaaggacgagtagcatttactgctgaagaagcggtggagaaagcaaaagaattaaattctgatgtttatgttgtaaaagcacaaattcatgctggaggtagaggtaaagcaggcggagtaaaaattgctaaatctttatctgaggtagaaacatatgcaaaagaattattagggaaaactttggtgacacatcaaactggtccagaaggtaaagaaattaagcgtttatatatcgaagaaggttgtgctattcaaaaagaatattacgttggattcgttattgatcgtgcgactgaccaagtaacattgatggcgtctgaagaagggggcactgagattgaagaagttgctgcgaagactcctgaaaagatcttcaaagaaactatcgatccagtaatcggactttcaccattccaagcaagacgaattgcgtttaatattaatattcctaaagaatctgttaacaaagctgctaaattcttattagcactttataatgtattcattgaaaaagattgttcaatcgtagaaatcaacccattagttacaacagctgatggtgatgtattggcattagatgctaaaattaattttgatgataatgcattattcagacataaagatgttgtagaattacgtgatttagaagaagaagatccgaaagagattgaagcgtctaaacatgatttatcatacattgcattagatggtgacatcggatgtatggttaatggtgcaggtttagccatggcaacaatggatacgattaatcatttcggtggaaacccagccaatttcttagatgcaggcggaagcgctactagagaaaaagtaactgaagcatttaaaatcattttaggtgatgaaaatgttaaaggtatttttgtaaacattttcggtggcattatgaaatgtgatgttatcgcagaaggtatcgttgaagctgtaaaagaagtagatttaactttaccactagttgtacgcctagaaggtacaaatgttgagttaggtaaaaaaatcttaaaagactcaggattagcaattgaaccagcagcaacaatggctgaaggtgcacaaaaaattgttaaactagtcaaagaagcataaggaaaggatgggagcactaagatgagtgtatttatagataagaatactaaagtaatggtacaaggtattacagggtctactgcccttttccatacaaaacaaatgcttgattatggtacgaaaatagtagcaggtgtgacgcctggtaaaggtggtcaagttgttgaaggcgttcctgttttcaacactgttgaagaagctaaaaatgaaactggggcaacggtttcagtcatttacgttccagcaccatttgctgcagactcaattttagaagcagctgatgcagacttagatatggttatttgtatcactgaacatattcctgtattagacatggttaaagttaaacgctacttacaaggtagaaaaacacgtttagttggtccgaactgtccaggtgtgattacagcagatgaatgtaaaattggtattatgcctggctatattcacaaaaaaggtcatgttggtgtagtatctcgttcaggtacattaacatatgaagcagtgcaccaattgactgaagaaggtattggtcaaactacagctgttggtattggtggagacccagtcaacggaacaaactttattgatgttttaaaagcattcaatgaagatgacgaaacgaaagcagttgttatgattggtgaaatcggtggtacggctgaagaagaagcagctgaatggattaaagcgaatatgacaaaaccagttgtaggctttatcggtggacaaacagcacctcctggaaaacgtatgggacatgctggtgcaatcatttcaggtggtaaaggtactgctgaagagaaaattaaaacattaaatagttgtggtgtgaaaacagcggcaacaccttcagaaattggttcaacattaattgaagctgctaaagaagcaggtatttatgaatcattattaactgttaataaataaagttaaaagatgatataaatggctatagcccattccatactttataaaagtatcggaaatgggctatttgtcgtgcgatgaattttagtacacttttcatattttggaaagacaagttaattattttacctcctacaatagctttataaaacaaagaaaattttaattaaaatatatagcgcactatgttataatgtttgtatattattgtaaggagtgtttcatcatgaataaacaacaaagtaaagtacgctattcaattagaaaagttagtattggaattttgtcaatttcaataggtatgtttttggcattgggtatgtcgaacaaagcatatgcagatgaaattgataaatctaaagattttacaagagggtatgagcaaaatgtattcgcgaaatcagagttaaatgctaataaaaatacgacaaaagacaaaataaaaaatgaaggtgctgttaaaacatcggacacaagtttaaagttagacaacaaatcagcaatttcaaacggaaatgaaattaatcaagatataaagatttcaaatactccgaaaaactcaagccaaggtaacaatctagttattaataacaatgaacttactaaagaaattaaaattgcaaacttggaagctcaaaattctaatcagaagaaaacgaataaagttactaataattactttggttactacagttttagagaagctccaaaaacacaaatctatactgtaaaaaaaggagacacacttagtgctatagcattaaaatacaaaactacagtttcaaatattcaaaatacaaataatatagcaaatcctaatttaatatttattggtcaaaaattaaaagtgccaatgacaccattagtagaaccaaaaccaaaaacagtgtcttcaaataataaaagtaatagtaatagcagtacattaaattatttgaaaacattagagaatagaggatgggatttcgacggtagttatggatggcaatgtttcgatttagttaatgtatattggaatcatctttatggtcatggattaaaaggatatggagctaaagatataccatatgcaaataattttaatagtgaagctaaaatttatcacaacacaccaactttcaaagctgaacctggggacttagtggtttttagtggaagatttggtggaggatatggtcatacagctattgtcttaaatggtgattatgatggaaaattaatgaagttccaaagtttagatcaaaactggaataatggtggatggcgtaaagcagaggttgcacataaagttgttcataattatgaaaatgatatgatttttattagaccatttaaaaaagcataatttaaatcgaaggcaggacattgaaatatgaaattttcaactttaagtgaagaagaatttaccaactacaccaaaaagcacttcaaacattatacgcagtctatagaattatataattatagaaataaaataaatcatgaagcacatattgtgggagtgaagaatgataaaaatgaagttatagctgcatgtttattaacagaggcacgaatttttaaattctacaaatatttctactctcatagaggtcctttacttgattatttcgatgctaaattagtttgttacttttttaaagaattatctaaattcatttataaaaatagaggagtatttattcttgttgatccatatttaatagagaatttaagagatgcaaatggtaggataataaagaattataataattcagtgatagtaaagatgctagggaaaattgggtatctccatcaaggttatacaacaggatattcaaataaaagtcaaattaggtggatttctgtattggatttaaaagataaagatgagaatcaacttttaaaagaaatggaataccaaactagaagaaatataaaaaagactattgagattggtgttaaggttgaagatttatctattgaagaaacaaatcgattttataaattgtttcaaatggctgaagaaaaacatggttttcatttcatgaatgaagattattttaaacgaatgcaagaaatatataaagataaggcaatgttaaagatagcttgtataaatcttaatgaatatcaagataaattaaaaatacaattattgaaaatcgaaaatgaaatgatgactgtgaacagagcattaaatgaaaatccaaattctaaaaaaaataaatcaaaattaaatcagttaaatatgcaattatctagtattaataatagaattagtaaaaccgaagaactaatatttgaagatggacctgttttggatttagctgctgctttatttatatgtactgatgatgaagtttattatctatcaagtggatcaaatccgaaatataatcagtatatgggtgcatatcatctacaatggcatatgataaaatatgcaaaatcacataatattaataggtataatttttatggaataacaggcgtctttagtaatgaggcggatgattttggtgttcaacaatttaaaaagggttttaatgcacatgttgaagaattaattggtgatttcatcaaaccagtaagaccaattctatataaatttgcaaaacttatttataaggtttaattataaagtatgttggaaattgaaattttaaattctttccaacatacttttcactttttaagtcagtatttttactccttaaaataacattacatcgacaatgtttttgtattagaaatgtaaaacaaaaatagaatatgattttgtatgattacaaaaaggagttgatttattgattaaactatttttgcttaagttatactgggcacacttttcgactaaacaaattcatcaatttttaatggcatatcctaatgtaattaaagaggagggaagaaaaaaagatagttatttatgtgaatgggtgaatagggaagaaaatgttcatttattacgtaaatactatgcttttataaaacttgatcataacgatattattaaagaactgcagaaattaaaagtaagttacattacatatatggattctgaatacccagtgctattaaaagaaatatatcaatttccattacttcttttctataaagggaacatcaaattaataaataatatgcatcatttggcagtagtaggtgcaagagattctacaagttatacccaacagtctttagaatttttattatcaaatgataaaagcaaatatttaacaattgtttccggccttgctcaaggagctgatgcaatggcacatcaaatagctttaaaatacaatctccctacaattgcagttttagcctttggccatcaaacacattatcccaaaagtacattagcattaagaaataaaatagaagaaaaaggtttagttatatctgaatatccaccacatacaccaatcgctaaatatagatttcctgagcgcaatagaattatcagcggtttgtcaaaaggggttttaattactgaggctaaggaacaaagtggcagtcacatcacgatagattttgcattagagcaaaatagaaatgtttatgttttacctggatctatgtttaatcctatgacaaaaggtaatttattacgtatccaagaaggtgctaaggtagtattaaacgctaatgatatatttgaagactactatatttaaaactaaaaataacgagttgcttcatatttcttttgtttccctttgtaatttattttttaataaaatctataaaaaatagacagggaaaatgatttgtttagatataaaacgttgacaaaagcaaaattaagcgtttatcatttatctttagtaattagattagcgagggggaaatgacattggcagataatttagtcattgttgaatcgcctgcaaaagcaaaaaccattgaaaagtatttaggtaagaaatataaagttatagcttcaatgggacacgtcagagacttaccaagaagtcaaatgggtgtcgacactgaagataattacgaaccaaaatatataacaatacgcggaaaaggtcctgttgtaaaagaattgaaaaaacatgcaaaaaaagcgaaaaacgtctttctcgcaagtgaccccgaccgtgaaggtgaagcaattgcttggcatttatcaaaaattttagagcttgaagattctaaagaaaatcgcgttgttttcaacgaaataactaaagacgctgttaaagaaagttttaaaaatcctagagaaattgaaatgaacttagtcgatgcacaacaagcgcgtcgaatattagatagattagttggctataacatctcgccagttctttggaaaaaagtaaaaaaagggttgtcagcgggtcgagttcaatctgttgcacttcgtttagtcattgaccgtgaaaatgaaattcgaaactttaaaccagaagaatattggactattgaaggagaatttagatacaaaaaatcaaaattcaatgctaaattccttcattataaaaataaaccttttaaactaaaaacgaaaaaagatgttgagaaaattacagctgcattagatggagatcaattcgaaattacaaacgtgactaaaaaagaaaaaacgcgtaatccagcaaacccatttacaacttctacattacaacaagaggcggcacgtaaattaaactttaaagcaagaaaaacaatgatggtcgcacaacaattatatgaaggtatagatttgaaaaaacaaggtacgattggtttaataacatatatgagaaccgattctacacgtatttcagatactgccaaagttgaagcaaaacagtatataactgataaatacggtgaatcttacacttctaaacgtaaagcatcagggaaacaaggtgaccaagatgcccatgaggctattagaccttcaagtactatgcgtacgccagatgatatgaagtcatttttgacgaaagaccaataccgattatacaaattaatttgggaacgatttgttgctagtcaaatggctccagcaatacttgatacagtctcattagacataacacaaggtgacattaaatttagagcgaatggtcaaacaatcaagtttaaaggatttatgacactttatgtagaaactaaagatgatagtgatagcgaaaaggaaaataaactgcctaaattagagcaaggtgataaagtcacagcaactcaaattgaaccagctcaacactatacacaaccacctccaagatatactgaggcgagattagtaaaaacactagaagaattgaaaattgggcgaccatcaacttatgcaccgacaatagatacgattcaaaagcgtaactatgtcaaattagaaagtaagcgttttgttcctactgagttgggagaaatagttcatgaacaagtgaaagaatacttcccagagattattgatgtggaattcacagtgaatatggaaacgttacttgataagattgcagaaggcgacattacatggaggaaagtaatcgacggtttctttagtagctttaaacaagatgttgaacgtgctgaagaagagatggaaaagattgaaatcaaagatgagccagccggtgaagactgtgaaatttgtggttctcctatggttataaaaatgggacgctatggtaagttcatggcttgctcaaacttcccggattgtcgtaatacaaaagcgatagttaagtctattggtgttaaatgtccaaaatgtaatgatggtgacgtcgtagaaagaaaatctaaaaagaatcgtgtcttttatggatgttcgaaatatcctgaatgcgactttatctcttgggataagccgattggaagagattgtccaaaatgtaaccaatatcttgttgaaaataaaaaaggcaagacaacacaagtaatatgttcaaattgcgattataaagaggcagcgcagaaataatatttttatttcctagatacattttaagattgttaaatagaatcattagtgaatcttattttaaagatagtaaaggattaatctaaataagtgcggataatataaacataacaacataattaaaagacataaatgacaataaaaggagtatagaaatgactcaaactgtaaatgtaataggtgctggtcttgccggttcagaagcggcatatcaattagctgaaagaggaattaaagttaatctaatagagatgagacctgttaaacaaacaccagcgcaccatactgataaatttgcggaacttgtatgttccaattcattacgcggaaatgctttaactaatggtgtgggtgttttaaaagaagaaatgagaagattgaattctataattattgaagcggctgataaggcacgagttccagctggtggtgcattagcagttgatagacacgatttttcaggttatattactgaaacacttaaaaatcatgaaaatatcacagttattaatgaagaaattaatgccattccagatggatacacaattatcgcaacaggaccacttactacagaaacccttgcgcaagaaatagtggacattactggtaaagatcaactttatttctatgatgcggctgctccaattattgaaaaagaatctattgatatggataaagtttacttaaagtcccgttatgataaaggtgaagctgcatatttaaactgtcctatgactgaggatgaatttaatcgcttttatgatgcagtattagaagctgaagttgcgcctgtaaattcatttgaaaaagaaaaatatttcgagggttgtatgccttttgaagtaatggcagaacgcggacgcaagacattactatttggaccaatgaaaccagtaggattagaagatccaaagactgggaaacgtccttatgcggtggttcaattaagacaagatgacgctgctggtacactctacaatattgttggcttccaaacgcatttaaaatggggagctcaaaaagaagtcattaaattaattccaggcttagaaaatgttgatattgttagatatggtgtgatgcatagaaataccttcattaattcaccggacgtattaaacgagaaatatgaattgatttcacaaccaaacatacagtttgcgggacaaatgactggtgttgaaggttatgtagaaagcgcagctagcggcttagttgcaggtatcaatcttgcgcataaaatattaggcaagggtgaggtagtatttccgagagaaacaatgattggaagtatggcttactatatttctcatgctaaaaacaataagaatttccaacctatgaatgctaacttcgggttattaccatctttagaaactagaattaaagataaaaaagaacgctatgaagcacaagctaatagagctttggattacttagaaaatttcaaaaaaactttataaaatagttagaaagactagatatgctattcattcttaagtcatcaacgagtaagtaatgactttctaaatggaaaatacttatcctagtctttttaattttggaattgttacgtatttctgacaatttagaattcgcattcaaaaaatatctaaataaataacacgcaataagttgattgatgtaacatgtaagagaatgttttaaataaactttatttaaaaggcaatgaaataataaatggcaaggctattaataaagacttttagtaattaatttaaaaaagaggtattctaattaacaggttttccgattagttacaattatttaattctcaaaagatttagaattgattatcaaattactgtaagccctttgctgtatatgctacaattcttattgatggagggtaaatgtattgaatcatattcaagatgcgtttttaaatacattgaaagttgaacggaatttttcggaacacacattgaaatcatatcaagatgacttaattcagtttaatcaatttttagaacaagaacatttagagttgaatacttttgaatacagagatgctagaaattatttgagctatttatattcaaatcatttgaaaagaacatctgtttctcgtaaaatctcaacgttaagaactttctatgaatattggatgacgcttgatgagaacattattaatccatttgttcaattagtacatccgaaaaaagaaaaatatcttccgcaattcttttacgaagaagaaatggaagcgttattcaaaactgtagaagaggacacttcaaaaaatttacgggatcgagttattcttgaattgttgtatgctacaggcatccgtgtttcggaattagtaaatattaaaaaacaagatatagatttttacgcgaatggtgttaccgtattaggaaaagggagcaaagagcgctttgtaccgtttggtgcttattgtagacaaagcatcgaaaattatttagaacatttcaaaccaattcagtcatgcaatcatgattttcttattgtaaatatgaagggtgaagcaatcactgaacgcggtgtacgatatgttttaaatgatattgttaaacgaacagcaggcgtaagtgagattcatccccacaagctcagacatacatttgcaacgcatttattgaatcaaggtgcagacctaagaacagtacaatcgttattaggtcatgttaatttgtcaacaactggtaaatatacacacgtatctaaccaacaattaagaaaagtgtatctaaatgcacatcctcgagcgaaaaaggagaatgaaacatgagtaatacaacattacatgcaacaacaatttatgctgtaagacataatgggaaagcagctatggctggagatgggcaagtaacgcttggtcaacaagtcatcatgaaacaaacggcaagaaaagtgcgacgtttatatgaaggtaaagtgttagctggtttcgcaggtagtgtagcagatgcgtttacgttatttgaaaaattcgaaacaaaattacaacagtttagtggtaacttagaaagagctgctgttgaattggcacaagaatggcgaggcgataaacaattacgtcaattagaagctatgctaattgtaatggataaagatgctattttagttgtcagtggaactggcgaagttattgctccagatgatgaccttatcgctattggatcaggaggcaactacgcattaagcgcaggacgtgcattgaaacgccatgcatcgcatttgtctgctgaagaaatggcatatgagagcttgaaagtagcggctgatatttgtgtctttaccaacgataatattgttgtcgaaacactataataatcagagcacgataaataattacgagcaattaattttagttaaaagacggaggaatgaaattaatggatacagctggaataagattaactccaaaagaaatcgtatctaaattaaatgaatacatcgttggacaaaatgatgctaaacgtaaagtggcaattgccctacgtaatcgatacagaagaagtttattagatgaggaatcaaagcaagaaatttcacctaaaaatattttgatgattggaccaaccggcgttggtaaaactgaaattgcaagaagaatggccaaagttgtcggcgcgccatttataaaagtagaagctactaaatttactgaggtaggttatgtaggacgagatgttgaaagtatggttagagatcttgttgatgtttcagtaagattagtcaaggcgcagaaaaaatcattggtacaagatgaagcaacagctaaggccaatgaaaaacttgttaagttattagttccaagtatgaaaaagaaagcgtctcaaacgaataatcctttagagtcacttttcggaggtgcaattccaaatttcggacaaaataacgaagatgaagaagaaccacctactgaggaaattaaaacaaaacgttctgaaattaagagacagctagaagaaggcaaacttgaaaaagaaaaggtaagaattaaagtcgaacaagatcctggtgctttaggtatgctaggtacaaatcaaaatcagcaaatgcaagagatgatgaatcaattaatgcctaaaaagaaagttgagcgagaagttgctgttgagacggcaaggaaaatcttagctgatagttatgcggatgaactaattgatcaagaaagcgctaaccaagaagcgcttgaattagcagaacaaatgggtatcatctttatagatgaaatcgacaaagttgcgacgaataatcataatagtggtcaagatgtctcaagacaaggtgttcaaagagatattttacctatacttgaaggtagcgttattcaaaccaaatatggtactgtgaatactgaacatatgctgtttataggtgctggagctttccatgtatctaagccgagtgacttgataccagaattgcaaggtcgttttccgattagagttgaacttgatagtttatcggtagaagattttgtaagaattttgacagaaccaaaattgtcattaattaaacaatatgaagcattgcttcaaacagaagaagttactgtaaactttaccgatgaagcaattactcgcttagctgagattgcttatcaagtaaatcaagatacagacaacattggtgcacgtcgacttcatacaattttagaaaagatgctagaagatttatcattcgaagcaccaagtatgccgaatgcagttgtagatattaccccacaatatgttgatgataaattaaaatcaatttcaacaaataaagatttaagtgcatttattctataaaaatatacaaaaggagaaaaattcatgagcttattatctaaaacgagagagttaaacacgttacttcaaaaacacaaaggtattgcggttgattttaaagatgtagcacaaacgattagtagcgtaactgtaacaaatgtatttattgtatcgcgtcgaggtaaaattttaggatcgagtctaaatgaattattaaaaagtcaaagaattattcaaatgttggaagaaagacatattccaagtgaatatacagaacgattaatggaagttaaacaaacagaatcaaatattgatatcgacaatgtattaacagtattcccacctgaaaacagagaattattcatagatagtcgtacaactatcttcccaattttaggtggaggggaaagattaggtacattagtacttggtcgagtacatgatgattttaatgaaaatgatttggtactaggtgaatatgctgctacagttattggtatggaaatcttacgtgagaagcatagtgaagtagaaaaagaagcgcgcgataaagctgctattacaatggcaattaattcattatcttattctgaaaaagaagcgattgaacatatctttgaagaacttggcggtacggaaggcctattaatcgcatcaaaagttgcagatagagttggtattactagatctgtaattgtaaatgcactacgtaaattagaaagtgctggtgtaattgaatcacgttctttaggaatgaaaggtactttcattaaagttaaaaaagaaaaattcttagatgaattagaaaaaagtaaataagtcgatgagtctgggacataattcaatgtcctagtcgtgacgatgttatcttggcggtagtcaatgaaatgactttgatgattatgttgaagtcatttctttatttttgtctaattttcaatcaaattgatatttcacattaacttgatagaattacctttaaatttatggaaaaatgcttgaaaaacatttgctttagacacggcattatgttatatttattttcggctataaagccaatacacacatatcaaacgtgattgtgtaaagggtgcaatatttatatattgtctttacaatagtttgctatggaggtaattaaccaataggaggaatttataatggcagtaatttcaatgaaacaattactagaagcgggtgttcacttcggtcaccaaacacgtcgttggaacccaaaaatgaaaaaatatatcttcactgagagaaatggtatttatatcatcgacttacaaaaaacagtgaaaaaagtagacgaggcatacaacttcttgaaacaagtttcagaagatggtggacaagtcttattcgtaggaactaaaaaacaagcacaagaatcagttaaatctgaagcagaacgtgctggtcaattctacattaaccaaagatggttaggtggattattaactaactataaaacgatctcaaaacgaatcaaacgtatttctgaaattgaaaaaatggaagaagatggtttattcgaagtattacctaaaaaagaagtagtagaacttaaaaaagaatacgaccgtttaatcaaattcttaggcggaattcgtgatatgaaatcaatgcctcaagcattattcgtagttgacccacgtaaagagcgtaatgcaattgctgaagctcgtaaattaaatattcctatcgtaggtatcgttgacactaactgtgatcctgacgaaattgactacgttatcccagcaaacgacgatgctatccgtgcggttaaattattaactgctaaaatggcagatgcaatcttagaaggtcaacaaggcgtttctaatgaagaagtagctgcagaacaaaacatcgatttagatgaaaaagaaaaatcagaagaaacagaagcaactgaagaataatcaactgttgaatctgacttagatatagtttaaatgggtgataagatattaatgcttatcaccttttttaaaaagaaaatcgaggcaaattacaaatattcaattagagtattggcaatcttgcctataataatgctaaaatcataatatataaaatgataacttattggaggaataatgaatggcaactatttcagcaaaacttgttaaagaattacgtgaaaaaactggcgcgggtatgatggattgtaaaaaagcgctaactgaaactgatggtgacatcgataaagcgattgactacctacgtgaaaaaggtattgctaaagcagctaaaaaagcagaccgtattgcggctgaaggtttagtacatgtagaaactaaaggtaacgacgcagttatcgttgaaatcaactctgaaacagactttgttgctcgtaacgaaggtttccaagagttagttaaagaaatcgctaatcaagtattagatacaaaagctgaaactgttgaagctttaatggaaacaactttaccaaatggtaaatcagttgatgaaagaattaaagaagcaatttcaacaatcggtgaaaaattaagtgttcgtcgttttgctatcagaactaaaactgataacgatgctttcggcgcttacttacacatgggtggacgcattggtgtattaacagttgttgaaggttcaactgacgaagaagcagcaagagacgttgctatgcatatcgctgcaatcaaccctaaatatgtttcttctgaacaagttagcgaagaagaaatcaaccacgaaagagaagttttaaaacaacaagcattaaatgaaggtaaaccagaaaacatcgttgaaaaaatggtggaaggacgtttacgtaaatacttacaagaaatttgtgctgtagatcaagacttcgttaaaaaccctgatgtaacagttgaagctttcttaaaaacaaaaggtggaaaacttgttgacttcgtacgctatgaagtaggcgaaggtatggaaaaacgcgaagaaaactttgcggatgaagttaaaggacaaatgaaataatctgtcataaagtaaaacaaggaagaagacacctttaatgttgctttattaaaatgtaaatcattctaataaaacgacaactgtgtcttctttacttgtatatgttacatatattcacgatagagaggataagaaaatggctcaaatttctaaatataaacgtgtagttttgaaactaagtggtgaagcgttagctggagaaaaaggatttggcataaatccagtaattattaaaagtgttgctgagcaagtggctgaagttgctaaaatggactgtgaaatcgcagtaatcgttggtggcggaaacatttggagaggtaaaacaggtagtgacttaggtatggaccgtggaactgctgattacatgggtatgcttgcaactgtaatgaatgccttagcattacaagatagtttagaacaattggattgtgatacacgagtattaacatctattgaaatgaagcaagtggctgaaccttatattcgtcgtcgtgcaattagacacttagaaaagaaacgcgtagttatttttgctgcaggtattggaaacccatacttctctacagatactacagcggcattacgtgctgcagaagttgaagcagatgttattttaatgggcaaaaataatgtagatggtgtatattctgcagatcctaaagtaaacaaagatgcggtaaaatatgaacatttaacgcatattcaaatgcttcaagaaggtttacaagtaatggattcaacagcatcctcattctgtatggataataacattccgttaactgttttctctattatggaagaaggaaatattaaacgtgctgttatgggtgaaaagataggtacgttaattacaaaataaatttagaggtgtaaaataatgagtgacattattaatgaaactaaatcaagaatgcaaaaatcaatcgaaagcttatcacgtgaattagctaacatcagtgcaggaagagctaattcaaatttattaaacggcgtaacagttgattactatggtgcaccaacacctgtacaacaattagcaagcatcaatgttccagaagcacgtttacttgttatttctccatacgacaaaacttctgtagctgacatcgaaaaagcgataatagcagctaacttaggtgttaacccaacaagtgatggtgaagtgatacgtattgctgtacctgccttaacagaagaacgtagaaaagagcgcgttaaagatgttaagaaaattggtgaagaagctaaagtatctgttcgaaatattcgtcgtgatatgaatgatcagttgaaaaaagatgaaaaaaatggcgacattactgaagatgagttgagaagtggcactgaagatgttcagaaagcaacagacaattcaataaaagaaattgatcaaatgattgctgataaagaaaaagatattatgtcagtataaaactaatatacaatgacatattaaaatgccagtattaaacgataatgtaacatttaaaatgggcatgtttaattaaatcaaagatgcatgtgataatttaaattcacaatgagcataaaaatggtgtttaaacaagttaattaaacatatactttataaataataggcattaggtatattgctataataaagttatgtaatttttaacctcagtatgtatgtcacatttctggtgtaaactgtaccgagtcagactttggtacagtttttttatttgcttattcaatgcattaaatgagtatgataaaatgataatgattgtttagtaacttatactatatgacagagatgatcaggctcggaggaaagaccatgtttaaaaagctaataaataaaaagaacactataaataattataatgaagaattagactcgtctaatatacctgaacatatcgctattattatggatggtaatgggcgatgggctaagaagcgaaaaatgcctagaattaaaggtcattacgaaggtatgcaaacaataaaaaaaattactagggtagctagtgatattggtgttaagtacttaactttatacgccttttccactgaaaattggtcaagacctgaaagtgaagtaaattatattatgaatttgcctgtcaatttcttaaagacattcttaccggaactaattgaaaaaaatgtcaaagttgaaacaattggatttactgataagttgccaaaatcaacgatagaagcaattaataatgctaaagaaaagacagctaataataccggcttaaaattaatatttgcaattaattatggtggcagagcagaacttgttcatagtattaaaaatatgtttgacgagcttcatcaacaaggtttaaatagtgatatcatagatgaaacatatataaacaatcatttaatgacaaaagactatcctgatccagagttgttaattcgtacttcaggagaacaaagaataagtaatttcttgatttggcaagtttcgtatagtgaatttatctttaatcaaaaattatggcctgactttgacgaagatgaattaattaaatgtataaaaatttatcagtcacgtcaaagacgctttggcggattgagtgaggagtagtatagtatgaaagttagaacgctgacagctattattgccttaatcgtattcttgcctatcttgttaaaaggcggccttgtgttaatgatatttgctaatatattagcattgattgcattaaaagaattgttgaatatgaatatgattaaatttgtttcagttcctggtttaattagtgcagttggtcttatcatcattatgttgccacaacatgcagggccatgggtacaagtaattcaattaaaaagtttaattgcaatgagctttattgtattaagttatactgtcttatctaaaaacagatttagttttatggatgctgcattttgcttaatgtctgtggcttatgtaggcattggttttatgttcttttatgaaacgagatcagaaggattacattacatattatatgcctttttaattgtttggcttacagatacaggggcttacttgtttggtaaaatgatgggtaaacataagctttggccagtaataagtccgaataaaacaatcgaaggattcataggtggcttgttctgtagtttgatagtaccacttgcaatgttatattttgtagatttcaatatgaatgtatggatattacttggagtgacattgattttaagtttatttggtcaattaggtgatttagtggaatcaggatttaagcgtcatttcggcgttaaagactcaggtcgaatactacctggacacggtggtattttagaccgatttgacagctttatgtttgtgttaccattattaaatattttattaatacaatcttaatgctgagaacaaatcaataaacgtaaagaggagttgctgagataatttaatgaatctcagaactccttttgaaaattatacgcaatattaactttgaaaattatacgcaatattaactttgaaaattagacgttatattttgtgatttgtcagtatcatattataatgacttatgttacgtatacagcaatcatttttaaaataaaagaaatttataaacaatcgaggtgtagcgagtgagctatttagttacaataattgcatttattattgtttttggtgtactagtaactgttcatgaatatggccatatgttttttgcgaaaagagcaggcattatgtgtccagaatttgcgatcggtatggggccaaaaatttttagttttagaaaaaatgaaacactttacactattaggttattgcctgttggtggatatgttcgtatggcaggagatggcttagaagagccaccagtcgagcccggtatgaacgttaaaattaaacttaatgaagaaaatgaaataacacatatcatattagatgatcatcataagtttcaacaaattgaagcgatcgaagttaaaaaatgtgattttaaggatgacttattcatagaaggtatcactgcttatgataatgaaagacatcattttaaaattgctagaaagtctttctttgttgaaaatggtagcttagttcaaattgctccgagagacagacaatttgcacataaaaagccatggccgaaatttttaacattatttgcgggaccgttatttaactttatattagctttagtcctatttattggtcttgcatattatcaaggcacgcctacgtctactgtagaacaagtcgcagataagtatccagctcaacaagcaggattacaaaaaggtgataagatcgtccaaattggcaaatataaaatatctgaatttgatgatgttgataaggcgttagataaagttaaagataataagacgactgttaaatttgaacgtgatggtaaaacaaagtcagttgaattaacacctaaaaagactgaaaaaaaactgactaaagtaagttcagagacgaagtatgttctcggattccaaccagcgagtgaacatacactttttaaaccaattgtattcggatttaaaagctttttaatcggtagtacttatatttttacagctgtagtaggtatgttggctagtatatttacgggcggattctcatttgatatgttaaatggtccggttggtatttatcataacgtcgactcagttgttaaagcgggtatcattagcttaattggttacactgcgttattaagtgtaaacttaggtattatgaatttaattcctattcctgcactagacggtggtcgtattttatttgttatatatgaagcgattttcagaaaaccagttaataaaaaagcggaaacaacgattattgctattggtgccattttcatggtcgttataatgatattagtaacgtggaatgatattcgacgatatttcttataatttaggaggataaataattatgaagcaatccaaagtttttataccaacgatgcgtgacgtgccatcagaagcagaagcacaaagtcatcgtttattattgaaatcgggtttgataaaacaaagtacaagtgggatttatagttatttaccgctagcaacacgtgtgttaaataatattactgcaattgtgcgacaagaaatggaacgtatcgattctgttgaaattttaatgccagcgttacaacaagctgaattatgggaagaatcaggacgttggggtgcatatggcccagaattaatgcgtttacaagatagacatggaagacaatttgcattaggtccaacacatgaagaattagttacatcaatagtaagaaatgaattgaaatcatacaaacaattaccgatgacattattccaaattcaatctaaattccgtgatgaaaagagaccacgttttggtttacttcgtgggcgtgaatttattatgaaagatgcatattcattccatgctgacgaggcatcattagatcaaacgtatcaagatatgtatcaagcgtatagccgtatttttgagagagttggcattaacgcaagaccagtagttgcagattcaggtgctataggcggtagccatacacatgaatttatggcattaagtgctatcggtgaggatacaatcgtttacagtaaagaaagtgattatgctgctaacatcgaaaaagcagaagtcgtttacgaaccaaatcataagcatactactgtgcaacctttagaaaaaattgaaacaccaaatgttaagactgcgcaagaattggcagacttcttaggtagaccagtagatgaaatcgttaaaacgatgattttcaaagttgatggcgaatatattatggttttagtgcgtggccatcatgaaattaatgacattaaattaaaatcttatttcggcacagataatattgaattagcaacacaagacgaaattgttaatttagttggtgcaaatcctggttcactaggtcctgtaattgataaagaaatcaaaatttatgcagataattttgtgcaagatttaaataatttagttgtcggtgctaacgaagatggttatcacttaattaatgtaaatgtaggtagagacttcaacgttgatgaatatggcgatttccgttttattttagaaggcgaaaagttaagtgatggttcaggcgttgcacattttgctgaaggtattgaagttggtcaagtattcaaattgggtactaagtattcagaatcaatgaatgctacattcttagataaccaaggaaaagctcaatctttaattatgggttgttacggaattggaatttctagaacgctaagtgcgattgttgaacaaaatcacgatgataatggaattgtttggcctaaatcagttactccgtttgatttacatttaatttctattaatcctaagaaagatgatcaacgagaactagcagatgcactatatgctgaatttaatactaaatttgatgtgttgtacgatgatcgtcaggaacgtgcaggtgttaaatttaatgatgccgatttaattggtttaccactgcgaattgttgttggtaaacgtgcatcggaaggtattgtagaagttaaagaacgtttaacaggtgatagcgaagaagttcacattgatgacttaatgactgtcattacaaataaatatgataacttaaaataattaagatcgaatgaattataagagtaggaaaaagctgaaagaaatctgatgcttatgtcctgctcttattatttttgatataatgattattcgatgaaaaatgactgaagacatagtataattaaagataaatttgttttaacaatataatgattagccaaatataaagcatttaattttctatcattactatgctcacataatctaaatattgttcgaacacgtaaaagtaatttctatttaaggtggtaattgtcttggcaatgacagagcaacaaaaatttaaagtgcttgctgatcaaattaaaatttcaaatcaattagatgctgaaattttaaattcaggtgaactgacacgtatagatgtttctaacaaaaacagaacatgggaatttcatattacattaccacaattcttagctcatgaagattatttattatttataaatgcaatagagcaagagtttaaagatatcgccaacgttacatgtcgttttacggtaacaaatggcacgaatcaagatgaacatgcaattaaatactttgggcactgtattgaccaaacagctttatctccaaaagttaaaggtcaattgaaacagaaaaagcttattatgtctggaaaagtattaaaagtaatggtatcaaatgacattgaacgtaatcattttgataaggcatgtaatggaagtcttatcaaagcgtttagaaattgtggttttgatatcgataaaatcatattcgaaacaaatgataatgatcaagaacaaaacttagcttctttagaagcacatattcaagaagaagacgaacaaagtgcacgattggcaacagagaaacttgaaaaaatgaaagctgaaaaagcgaaacaacaagataacaacgaaagtgctgtcgataagtgtcaaattggtaagccgattcaaattgaaaatattaaaccaattgaatctattattgaggaagagtttaaagttgcaatagagggtgtcatttttgatataaacttaaaagaacttaaaagtggtcgccatatcgtagaaattaaagtgactgactatacggactctttagttttaaaaatgtttactcgtaaaaacaaagatgatttagaacattttaaagcgctaagtgttggtaaatgggttagggctcaaggtcgtattgaagaagatacatttattagagatttagttatgatgatgtctgatattgaagagattaaaaaagcgacaaaaaaagataaggctgaagaaaagcgtgtagaattccacttgcatactgcaatgagccaaatggatggtatacccaatattggtgcgtatgttaaacaggcagcagactggggacatccagccattgcggttacagaccataatgttgtgcaagcatttccagatgctcacgcagcagcggaaaaacatggcattaaaatgatatacggtatggaaggtatgttagttgatgatggtgttccgattgcatacaaaccacaagatgtcgtattaaaagatgctacttatgttgtgttcgacgttgagacaactggtttatcaaatcagtatgataaaatcatcgagcttgcagctgtgaaagttcataacggtgaaatcatcgataagtttgaaaggtttagtaatccgcatgaacgattatcggaaacgattatcaatttgacgcatattactgatgatatgttagtagatgcccctgagattgaagaagtacttacagagtttaaagaatgggttggcgatgcgatattcgtagcgcataatgcttcgtttgatatgggcttcatcgatacgggatatgaacgtcttgggtttggaccatcaacgaatggtgttatcgatactttagaattatctcgtacgattaatactgaatatggtaaacatggtttgaatttcttggctaaaaaatatggcgtagaattaacgcaacatcaccgtgccatttatgatacagaagcaacagcttacattttcataaaaatggttcaacaaatgaaagaattaggcgtattaaatcataacgaaatcaacaaaaaactcagtaatgaagatgcatataaacgtgcaagacctagtcatgtcacattaattgtacaaaaccaacaaggtcttaaaaatctatttaaaattgtaagtgcatcattggtgaagtatttctaccgtacacctcgaattccacgttcattgttagatgaatatcgtgagggattattggtaggtacagcgtgtgatgaaggtgaattatttacggcagttatgcagaaggaccagagtcaagttgaaaaaattgccaaatattatgattttattgaaattcaaccaccggcactttatcaagatttaattgatagagagcttattagagatactgaaacattacatgaaatttatcaacgtttaatacatgcaggtgacacagcgggtatacctgttattgcgacaggaaatgcacactatttgtttgaacatgatggtatcgcacgtaaaattttaatagcatcacaacccggcaatccacttaatcgctcaactttaccggaagcacattttagaactacagatgaaatgttaaacgagtttcattttttaggtgaagaaaaagcgcatgaaattgttgtgaaaaatacaaacgaattagcagatcgaattgaacgtgttgttcctattaaagatgaattatacacaccgcgtatggaaggtgctaacgaagaaattagagaactaagttatgcaaatgcgcgtaaactgtatggtgaagacctgcctcaaatcgtaattgatcgattagaaaaagaattaaaaagtattatcggtaatggatttgcggtaatttacttaatttcgcaacgtttagttaaaaaatcattagatgatggatacttagttggttcccgtggttcagtaggttctagttttgtagcgacaatgactgagattactgaagtaaacccgttaccgccacactatatttgtccgaactgtaaaacgagtgaatttttcaatgatggttcagtaggatcaggatttgatttacctgataagacgtgtgaaacttgtggagcgccacttattaaagaaggacaagatattccgtttgaaacatttttaggatttaagggagataaagttcctgatatcgacttaaactttagtggtgaatatcaaccgaatgcccataactacacaaaagtattatttggtgaggataaagtattccgtgcaggtacaattggtactgttgctgaaaagactgcttttggttatgttaaaggttatttgaatgatcaaggtatccacaaaagaggtgctgaaatagatcgactcgttaaaggatgtacaggtgttaaacgtacaactggacagcatccagggggtattattgtagtacctgattacatggatatttatgattttacgccgatacaatatcctgccgatgatcaaaattcagcatggatgacgacacattttgatttccattctattcatgataatgtattaaaacttgatatacttggacacgatgatccaacaatgattcgtatgcttcaagatttatcaggaattgatccaaaaacaatacctgtagatgataaagaagttatgcagatatttagtacacctgaaagtttgggtgttactgaagatgaaattttatgtaaaacaggtacatttggggtaccagaattcggtacaggattcgtgcgtcaaatgttagaagatacaaagccaacaacattttctgaattagttcaaatctcaggattatctcatggtacagatgtgtggttaggcaatgctcaagaattaattaaaaccggtatatgtgatttatcaagtgtaattggttgtcgtgatgatatcatggtttatttaatgtatgctggtttagaaccatcaatggcttttaaaataatggagtcagtacgtaaaggtaaaggtttaactgaagaaatgattgaaacgatgaaagaaaatgaagtgccagattggtatttagattcatgtcttaaaattaagtacatgttccctaaagcccatgcagcagcatacgttttaatggcagtacgtatcgcatatttcaaagtacatcatccactttattactatgcatcttactttacaattcgtgcgtcagactttgatttaatcacgatgattaaagataaaacaagcattcgaaatactgtaaaagacatgtattctcgctatatggatctaggtaaaaaagaaaaagacgtattaacagtcttggaaattatgaatgaaatggcgcatcgaggttatcgaatgcaaccgattagtttagaaaagagtcaggcgttcgaatttatcattgaaggcgatacacttattccgccgttcatatcagtgcctgggcttggcgaaaacgttgcgaaacgaattgttgaagctcgtgacgatggcccatttttatcaaaagaagatttaaacaaaaaagctggattatctcagaaaattattgagtatttagatgagttaggctcattaccgaatttaccagataaagctcaactttcgatatttgatatgtaaaatgaaataatcaaggtatttatttaatgcgtatggcgtagtcaaagaaatacaaaattgttgctggacacaaaattatgcccgtatttcttttcaatgtcttacgagtctattcaaatgtaatggtgaaataaaggaacaaacttttacaagaatctctgattaatagtgaagtcatttgtttcaagcataaacttatgctataattaagttgcttaaaaattagtgaactcaggcagaagagtgggagattcccgctcttttctatttgccaaaaagggaggcctgtatgagtaaaattacagaacaagtagaagtgattgttaaaccaattatggaagacttgaattttgaacttgtagacgttgaatatgtcaaagagggtagagatcattttcttagaatctctattgataaagaaggtggcgtagatttaaatgattgtacgctagcttctgaaaaaataagtgaagctatggatgcaaatgatcctattcctgaaatgtattatttagacgtagcgtcacctggtgcagaacgtccaattaaaaaagaacaagatttccaaaatgcaataactaaacctgtatttgtttctttatatgtaccaattgaaggtgaaaaggaatggttaggcattttacaagaagtcaataatgaaacaattgtagtacaagttaaaatcaaagcaagaacgaaagatatagagataccgagagacaaaatagcaaaagcacgtcacgcagttatgatttaacgtgatgaggaggaaaaaacgtgtcaagtaatgaattattattagctactgagtatttagaaaaagaaaagaagattcctagagcagtattaattgatgctattgaagcagctttaattactgcatacaaaaagaattatgatagtgcaagaaatgtccgtgtggaattaaatatggatcaaggtactttcaaagttatcgctcgtaaagatgttgttgaagaagtatttgacgacagagatgaagtggatttaagtacagcgcttgttaaaaaccctgcatatgaaattggtgatatatacgaagaagatgtaacacctaaagattttggtcgtgtaggtgctcaagcagcgaaacaagcagtaatgcaacgtcttcgtgatgctgaacgtgaaattttatttgaagaatttatagacaaagaagaagacatacttactggaattattgaccgtgttgaccatcgttatgtatatgtgaatttaggtcgtatcgaagctgttttatctgaagcagaaagaagtcctaacgaaaaatatattcctaacgaacgtatcaaagtatatgttaacaaagtggaacaaacgacaaaaggtcctcaaatctatgtttctcgtagccatccaggtttattaaaacgtttatttgaacaagaagttccagaaatttacgatggtactgtaattgttaaatcagtagcacgtgaagctggcgatcgctctaaaattagtgtcttctctgaaaacaatgatatagatgctgttggtgcatgtgttggtgctaaaggcgcacgtgttgaagctgttgttgaagagctaggtggtgaaaaaatcgacatcgttcaatggaatgaagatccaaaagtatttgtaaaaaatgctttaagcccttctcaagttttagaagttattgttgatgaaacaaatcaatctacagtagttgttgttcctgattatcaattgtcattagcgattggtaaaagaggacaaaacgcacgtctagctgctaaattaaccggctggaaaattgatattaaatcagaaacagatgcgcgtgaagcgggtatctatccagtagttgaagctgaaaaagtaactgaagaagatgttgctttagaagatgctgacacaacagaatcaaccgaagaggtaaatgatgtttcagttgaaacaaatgtagagaaagaatctgaataataggttggagtgaagtatctatgaaaaagaaaaaaattccgatgcgaaaatgtattctttcaaatgaaatgcatcccaaaaaagatatgattcgtgttgttgttaataaagaaggcgaaatctttgcggatgttactggaaagaaacaaggccgtggcgcatatgtttctaaagatgttgctatggttgaaaaagcacaacaaaaagaaattttagaaaaatattttaaagcatctaaagagcaattggatcctgtttacaaagaaattattagattaatttatagagaagagatcccaaaatgagtatagatcaaatattaaactttttaggattagcaatgagagctggtaaagtaaaaacaggtgaatcagtcattgttaatgagattaaaaaaggaaatttgaagctcgttattgttgcaaatgatgcgtctgataatacagctaaattaattacagataaatgtaagagttacaaagttccattcagaaagtttggaaatcgaaatgaattgggaatagcacttggaaaaggtgagcgtgttaatgtagggattactgacccaggctttgctaaaaagttgctatcaatgatagatgaatatcataaggagtgattatatgagtaaacaaagaatttacgaatatgcgaaagaattaaatctaaagagtaaagagattatagatgagttaaaaagcatgaatattgaggtttcaaatcatatgcaagctttggaagatgaccaaattaaagcattagataaaaagttcaaaaaagaacaaaagaacgacaataaacaaagcactcaaaataatcaccaaaaatcaaacaatcaaaaccaaaataaagggcaacaaaaagataacaaaaagaatcaacaacaaaataataaaggcaacaaaggcaataaaaagaataatagaaataataagaaaaataacaagaataataaaccacaaaatcaaccagctgctccaaaagaaataccatcaaaagtgacatatcaagaaggtattacagtaggcgaatttgcggataaattaaatgttgaatcatcagaaattatcaaaaaattattcttacttggtattgttgctaatatcaatcaatcattaaatcaagaaacaatcgaattaattgccgatgattatggcgttgaggttgaagaagaagttgtgattaatgaagaagacttatcaatctatttcgaagacgaaaaagatgatccagaggcaattgagagaccagcagttgtaacaattatgggacatgttgaccatggtaaaacgactttattagattcaattcgtcatacaaaagttacagcaggtgaagcaggcggaatcactcaacatattggtgcatatcaaattgaaaacgatggcaaaaaaatcactttcttagatacaccgggacatgctgcatttacaacgatgcgtgcgcgtggtgcacaagtaacagatattactattttagtagtagcagctgacgatggtgttatgccacaaacaattgaagcaattaaccatgctaaagaagcagaagtaccaattattgttgcagtaaataaaattgataaaccaacttcaaatcctgatcgagttatgcaagaattaactgaatatggtttaattcctgaagattggggcggcgaaacaattttcgttccactttctgcattaagtggtgatggtatcgacgatttattagaaatgataggattagttgcagaagttcaagaacttaaagcaaatcctaaaaaccgtgctgttggtacagttatcgaagctgaattagataaatcacgtggtccttctgcatcattattagtacaaaacggtacattaaatgttggtgatgcgattgtagttggtaatacttacggccgtatccgtgcaatggttaatgacttaggtcaaagaatcaaaacggctggtccatcaacgcctgttgaaattacaggtattaatgatgtgccacaagctggggatcgctttgttgtatttagtgatgaaaaacaagctcgtcgtattggtgaatcaagacacgaagctagcattatacaacaacgtcaagaaagtaaaaatgtttcattagataacctgtttgaacaaatgaaacaaggtgaaatgaaagatttaaacgttattattaaaggtgatgttcaaggttctgttgaagctttagctgcatcattaatgaaaattgatgttgaaggcgtaaatgttcgtatcattcatacagcggttggtgcaattaatgagtcagacgtgacacttgctaatgcctcaaatggtattatcattggtttcaatgttcgtccagacagtggtgcaaaacgtgctgcagaagctgaaaatgttgatatgcgtttacacagagttatttataatgttatcgaagaaattgaatcagcgatgaaaggtttacttgatccagaatttgaagaacaagttatcggacaagctgaagttcgtcaaacattcaaagtttctaaagttggtactattgctggatgttatgttactgaaggtaaaattacgcgaaatgctggtgtacgtattattcgtgatggtattgttcaatatgaaggcgaattagatacacttaaacgtttcaaagatgatgctaaggaagttgcaaaaggttatgaatgtggtattacaattgaaaactacaatgaccttaaagaaggcgatgttatcgaagcatttgaaatggttgaaattaagcgttaattaaataaattacaagctaaaagtatagttaagattgatatgctccctataaatattgcactttttaagtgtctactttatagggagcatatttgatactagcttttggttttttattagaatagattacctattaaaagttacgttatatggacatgattttgtataaaattttgtggtggcctagaatgatttttaatgacaaaatataatgtcgactattattggaaaattttctgttgaaatgcctatcttacggcaaactttatttgattttataggcttaatttattaaaataacgtgtgagctaaaataattgtttaagcattgttacactaaaaaatgcaaataacaattgaacttaaagataaagaggtgacaagaatgagcagtatgagagcagagcgtgttggtgaacaaatgaagaaggaattaatggatatcatcaacaataaagtcaaagatcctcgagttggttttattacaattacagatgttgttttaacaaatgatttatcgcaggctaaagtatttttaactgtattaggtaacgataaagaagtagaaaatacatttaaagcacttgataaagcaaaaggcttcattaagtctgaattaggttctagaatgcgattacgtattatgccggaattaatgtatgaatatgatcaatcaatcgaatatggtaataaaattgaacgaatgattcaagatttacacaaacaagatagataatttagtgttaggtatctggaaaatgtttgataatttcttaatatcggtatattaacattaaacagttaatacatagatgtgtagaaatagttaacattttccagtttttttatgaataaatttagttgatacgctattaaaatatattttaaaaaagaaggtgactatatgtataatgggatattaccagtatataaagagcgcggtttaacaagtcatgacgttgtattcaaattgcgtaaaatattaaaaactaaaaaaataggtcacacgggtacgcttgatcccgaagttgcaggcgtgttaccggtatgtataggtaatgcaacgagagttagtgattatgttatggatatgggcaaagcttatgaagcaactgtatcgataggaagaagtacaacgactgaagatcaaacgggtgatacattggaaacaaaaggtgtacactcagcagattttaataaggacgatattgaccgattgttagaaagttttaaaggtatcattgaacaaattccgccgatgtactcatccgtcaaagtaaatggtaaaaaattatatgaatatgcgcgtaataatgaaacagttgaaagaccaaagcgtaaagttaatattaaagacattgggcgtatatctgaattagattttaaagaaaatgagtgtcattttaaaatacgcgtcatctgtggtaaaggtacatatattagaacgctagcaactgatattggtgtgaaattaggctttccggcacatatgtcgaaattaacacgaatcgagtctggtggatttgtgttgaaagatagccttacattagaacaaataaaagaacttcatgagcaggattcattgcaaaataaattgtttcctttagaatatggattaaagggtttgccaagcattaaaattaaagattcgcacataaaaaaacgtattttaaatgggcagaaatttaataaaaatgaatttgataacaaaattaaagaccaaattgtatttattgatgatgattcagaaaaagtattagcaatttatatggtacaccctacaaaagaatcagaaattaaacctaaaaaagtctttaattaaaggagatagaatttatgaaagtcatagaagtgacacatcctatacaatctaaacagtatattacagaggatgttgcaatggcattcggatttttcgatggcatgcataaaggtcatgacaaagtctttgatatattaaacgaaatagctgaggcacgcagtttaaaaaaagcggtgatgacatttgatccgcatccgtctgtcgtgttgaatcctaaaagaaaacgaacaacgtatttaacgccactttcagataaaatcgaaaaaattagccaacatgatattgattattgtatagtggttaatttttcatctaggtttgctaatgtgagcgtagaagattttgttgaaaattatataattaaaaataatgtaaaagaagtcattgctggttttgattttacttttggtaaatttggaaaaggtaatatgactgtacttcaagaatatgatgcgtttaatacgacaattgtgagtaaacaagaaattgaaaatgaaaaaatttctacaacttctattcgtcaagatttaatcaatggtgagttgcaaaaagcgaatgatgctttaggctatatatattctattaaaggcactgtagtgcaaggtgaaaaaaggggaagaactattggcttcccaacagctaacattcaacctagtgatgattatttgttacctcgtaaaggtgtttatgctgttagtattgaaatcggcactgaaaataaattatatcgaggggtagctaacataggtgtaaagccaacatttcatgatcctaacaaagcagaagttgtcatcgaagtgaatatctttgactttgaggataatatttatggtgaacgagtgaccgtgaattggcatcatttcttacgtcctgagattaaatttgatggtatcgacccattagttaaacaaatgaacgatgataaatcgcgtgctaaatatttattagcagttgattttggtgatgaagtagcttataatatctagagttgcgtatagttatataaacaatctataccacacctttttcttagtaggtcgaatctccaacgcctaactcggattaaggagtattcaaacattttaaggaggaaattgattatggcaatttcacaagaacgtaaaaacgaaatcattaaagaataccgtgtacacgaaactgatactggttcaccagaagtacaaatcgctgtacttactgcagaaatcaacgcagtaaacgaacacttacgtacacacaaaaaagaccaccattcacgtcgtggattattaaaaatggtaggtcgtcgtagacatttattaaactacttacgtagtaaagatattcaacgttaccgtgaattaattaaatcacttggtatccgtcgttaatcttaatataacgtctttgaggttggggcatatttatgttccaaccttaatttatattaaaaaagctttttacaaatattaacatttattatatgttaagctaatattgagtgaataataaggttacaatgagataaagatgatataagtacacctagagtaataatcaagatattaaaaataaagtatgtttttttaaaaaatataacttatatttatactgataagggtgggacgataagtctattttgtaaataatagatggatatcccgctctctttttttccaattcaatattttataactaatattaaaatacgataataaatgatatgatataactattagattcaagagaggagatttataatgtctcaagaaaagaaagtttttaaaactgaatgggcaggaagatctttaacgattgaaacagggcaattagctaaacaagcaaatggcgctgtattggttcgttatggagatacagtcgtgttatcgacggcaactgcatcaaaagaacctcgtgatggagatttcttcccattaacagtgaactatgaagaaaaaatgtacgctgcgggtaaaattcctggtggatttaaaaagagagaaggacgtcctggtgacgatgcaacattaactgcgcgattaattgatagaccaattagacctttattccctaaaggatataagcatgatgttcaaattatgaacatggtattaagtgcagatcctgattgttcaccacaaatggctgcaatgattggttcatctatggcgcttagtgtgtcggatattccattccaagggccaatcgccggtgtaaatgtgggttatattgacggtaaatatatcattaacccaacagtagaagaaaaagaagtttctcgtttagaccttgaagtagctggtcataaagatgcggtaaacatggtagaggcaggcgctagtgagattactgaacaagaaatgttagaggcgattttctttggtcatgaagagattcaacgtttagttgatttccaacaacaaatcgtcgaccacattcaacctgttaaacaagaatttattccagcagagcgtgatgaagcgctagttgaacgtgtaaaatctttaaccgaagaaaaaggacttaaagaaacagttttaacatttgataaacaacaacgagatgaaaatcttgataacttaaaagaagaaatcgtcaatgaatttatcgatgaagaagatccagagaatgaattacttattaaagaagtttatgcaattttaaatgaattagtgaaagaagaagttcgacgtttaattgcagatgaaaaaattagaccagacggccgtaaacctgatgaaatccgtccattagattctgaagttggtattttacctagaacgcatggttcaggtctatttacacgtggtcagactcaagcactttcagttttaacattaggtgctttaggcgattatcaattaattgatggtttaggacctgaagaagaaaaaagattcatgcatcattacaacttcccgaatttttcagtaggtgaaactggtccagtacgtgcgccaggtcgtcgtgaaattggacatggtgcgttaggtgaaagagcattaaaatatattattcctgatactgctgatttcccatatacaattcgtattgtaagtgaggtacttgaatcaaatggttcatcatctcaagcgtcaatttgtggatcaacattagcattaatggatgcgggcgtaccgattaaagcaccagttgctggtattgctatgggccttgttacacgtgaagatagctatacgattttaactgatatccaaggtatggaagatgcattaggtgatatggactttaaagtcgctggtactaaagaaggtattacagcaatccaaatggatattaaaattgacggtttaacgcgtgaaattatcgaagaggctctagaacaagcgagacgtggtcgtttagaaataatgaatcatatgttacaaacaattgatcaaccacgtactgaattaagtgcttacgcgccaaaagttgtaactatgacaattaaaccagataagattagagatgttatcggacctggtggtaaaaaaattaacgaaattattgatgaaacaggtgttaaattagatattgaacaagatggtactatctttattggtgctgttgatcaagctatgataaatcgtgctcgtgaaatcattgaggaaattacacgtgaagcggaagtaggtcaaacttatcaagccactgttaaacgtattgaaaaatacggtgcgtttgtaggcctattcccaggtaaagatgcgttgcttcacatttcacaaatttcaaaaaatagaattgaaaaagtggaagatgtattaaaaatcggtgacacaattgaagttaagattactgaaattgataaacaaggtcgagtaaatgcttcacatagagcattagaagaataatatttaaagtcatatgacgacaatgtatcgtcatgtgatttttttatgccactttttacgaagtgacccgttttgaatttgttgtattgaacattttaaaacgctttattattttgtgtgcaactgttaattatcctgtatgtatagtgattaatagtgtacatcaagtgttttttaacttataatgaatagtgagtttatatatggacgggtaacaaatttaggaggtaagattttgagtttaataaagaaaaagaataaagatattcgcattataccattaggcggtgttggcgaaattgctaaaaatatgtatatcgttgaagtagacgatgaaatgtttatgttagatgctggacttatgtttccagaagacgaaatgctaggtattgatattgttataccagacatttcatacgtacttgaaaataaagataaattgaagggtatattccttacacacggacatgagcacgcgattggtgcagtgagttatgttttagaacaattagatgcaccagtatatggatctaaattgacaatagcgttaattaaagaaaatatgaaagcccgtaatattgataaaaaagttcgctactatacagttaataatgattcaattatgagattcaaaaacgtgaatattagtttctttaatacgacacacagtattcctgatagtttaggtgtttgtattcacacttcatatggtgccattgtgtatacaggtgaatttaagtttgaccaaagtttacatggacattatgcaccagatattaaacgtatggcagagattggtgaagaaggcgtatttgtcttaatcagtgattctactgaggcagagaaacctggatataatactccggaaaatgtgattgaacatcatatgtatgatgcttttgcaaaagtgcgaggtcgcttgatagtttcatgttatgcttcgaactttatacgtattcagcaagttttaaatattgctagcaagctaaatcgtaaagtgtcatttttaggaagatcacttgaaagttcatttaatattgctcgtaaaatggggtatttcgacattcctaaagatttgctaattcctataacagaagttgataattatcctaaaaatgaagtgataattatagctactggtatgcaaggagaacctgtagaagccttaagtcaaatggcgcaacataagcataaaattatgaatatcgaagaaggcgattctgtatttttagcaattacggcttctgctaatatggaagttatcattgcgaatacattaaatgagcttgtacgtgctggcgcacatattattccaaataacaaaaagattcatgcttcaagtcatggttgcatggaagaattaaaaatgatgattaatattatgaaacctgaatactttattcctgtacaaggtgaatttaaaatgcagatagcacatgcgaagctagcagctgaagcaggtgttgcaccagaaaagattttccttgtggaaaaaggagatgtcattaattacaacggtaaagatatgatattaaatgaaaaggtaaattcaggaaatattttaatagatggcattggtattggggatgtaggaaatatcgtgttgagagaccgtcatcttttagcagaagatggtatctttattgctgttgtaacgttagatcctaaaaatagacgtatagctgcgggacctgaaattcaatctcgtgggtttgtatatgtacgtgaaagtgaagacttattacgtgaagcagaagagaaagtacgtgaaatagtagaggctggtttacaagaaaaacgcatagaatggtctgaaattaaacaaaatatgcgtgatcaaattagtaaactattattcgaaagtacaaaacgtcgtcctatgattattccagtaatttctgaaatttaatcaaaaagtcattaacataaaagaggtcagaacaagtcactgaaatataatggttgtcatggacaatttacttatattttatgatagtcaattgaaggggtaacgattaatctgttatcttaagtaaattgatacatagatgatattgttctaacctctttcatcgtctgtttggactacatattctaaacatcaaataggaaattatatataataacgtcgttttaactaaggcaacataaggaggtgcgtcaattggcacaagcaaaaaagaaatcgacagctaagaaaaaaacaacatcaaaaaaaagaacaaattcgaggaaaaagaagaatgataatccgatacgttatgtcatagctattttagtagttgtattaatggtgttgggtgttttccaattaggaataataggtcgtctaattgacagcttctttaattatttatttgggtacagtagatatttaacatatattttagtactcttagcaactggttttattacatactctaaacgtattcctaaaactagacgaacggctggttcgattgtattgcaaattgcattgctatttgtatcacagttagtttttcattttaatagtggtatcaaagctgaaagagaacctgtactttcttatgtgtatcagtcataccaacacagtcatttcccaaattttggtggcggtgtattaggcttttatttattagagttaagcgtacctttaatttcattatttggtgtatgtattattactattttattattatgctcaagtgttattttattaacaaaccatcaacatcgtgaagttgcaaaagttgcactggaaaatataaaagcttggtttggttcatttaatgaaaaaatgtcggaaagaaaccaagaaaaacaattgaagcgtgaagaaaaagcaagacttaaagaagaacaaaaggcacgtcaaaatgaacagccacaaataaaagatgtgagtgattttacggaagtgcctcaagaaagagatattccaatttatgggcatactgaaaatgaaagtaaaagccagagtcaaccaagtcgaaaaaaacgagtgtttgatgcagagaatagttcgaataacatcgtaaatcatcatcaagcagatcagcaagaacaattaacagaacaaactcataacagtgttgaaagtgaaaacactattgaagaagctggtgaagttacgaatgtatcgtatgttgttccaccgttaactttacttaatcaacctgcaaaacaaaaagcaacatctaaagctgaagtgcaacgtaaaggacaagtactagagaatacattaaaagattttggggtaaatgcaaaagtgacacaaattaaaattggtcctgcagtaactcaatatgaaattcaaccagctcaaggggttaaagtgagtaaaattgtaaacttgcataatgatattgcattagctttagcagcaaaagatgttagaatcgaagcgccaatacctggtcgttctgcagtaggtattgaagtgccaaatgagaaaatttcattagtttcactaaaagaagttttagatgaaaaattcccgtctaataataaactagaagttggattaggaagagatatatcaggtgatccaattactgttccactaaatgaaatgccacacttattggtggcaggatcgacgggtagtggtaaatctgtttgtataaatggtattattacaagtattttattaaatgctaagccgcatgaagttaaacttatgttaatcgatccgaaaatggttgaactaaatgtttataacggaattccacacttattaattccggttgttacaaatcctcataaagctgctcaagctttagaaaaaattgtagctgagatggaaagacgttatgatttattccaacattcatcaactagaaacattaaaggttataacgaattaatccgtaagcaaaatcaagaattagatgagaagcaaccagaattaccttatatcgttgttattgtagatgagcttgcagatttaatgatggtagctggtaaagaagttgaaaatgcgattcaacgtattacacaaatggcacgtgcagcaggtatacatttaattgtagcgacacaaagaccttctgtggatgtaattacaggtatcattaaaaataatattccatctagaatagcttttgctgtgagttctcaaacagattcaagaactattattggtactggcggcgcagaaaagttacttggtaaaggtgacatgttatacgttggaaatggtgactcatcacaaacacgtattcaaggggcgtttttaagtgaccaagaggtgcaagatgttgtaaattatgtagtagaacaacaacaggcaaattatgtaaaagaaatggaaccagatgcaccagtggataaatcggaaatgaaaagtgaagatgctttatatgatgaagcgtatttgtttgttgttgaacaacaaaaggcaagtacatcattgttacaacgccaatttagaattggttataatagagcatctaggttgatggatgatttagaacgcaatcaggtaatcggtccacaaaaaggaagcaagcctagacaagttttaatagatcttaataatgacgaggtgtaaaaaaatgtcagaaatgaatgcggtatataacgttaaacaatacattttaaatttgattaagcaaaataaattggaatatggtgaccaacttccaagtaatttatcaattgccagagaattaaatgtaaaaaccgacgatgtttatgaagcaattcaggcattgattactgaacaagtcattaaagataattttgaagagggcacaagtgttaagtcactgccccctttcttttatccattgaatgaacttataagtattgggcaaatgattaaaaatgcaggatttgaatgcggaactgaatacttaaattttgatgagcaaccagcaactatgttagatgcaaatttgttgagcgttgaagaaggatatccagtaaccattatagaacgattacgaactgccgatggagaaccggtcgtctattgtttagataaaattgctaaaaaagaattaacatgtacagagtatcaaatgagcaatggatcgattctaagtgcgataaaagaacaaagtaatcataatatttgttatgctgatacagaaattgaagcggtaaattatgaacctcgaatatccgaagtactgaatgcttcgccacacgaaggtttgattttattaaaaattacgcactataatgaatcagatgaacctattttgtattcattaaattatatgaaaaatagcttagttcaatttaaaatcactagaaaaatatagatgtaagaagatatagaggaggctatatatttgagtagacaatctcaaccaaatatacatatcaaagtttcaccaacaactaaatttaaaacaactactatagtttttaaatttatggcacctttagaatatgacacaataacagctagatcattattaagcaaattattagttcgagcaactaagaaatggccaaccgataagtcgtttaataatcacttagccgatttatatggtgcgtatgtgaatagtacaatttcaaaattcaaagatcagcatgtcattacattttcattagaaattgttaatgaacgttatttaagaaacggtgaatcattatttaatcaaggattagatttattacaagaaatcatttggaatccattaattgaaaataaagcattcaatgataattttgttaaccaagagaaaacattattagccaaaaaaatagaagcaatggtagataataaagcacaatattcgtttttaaaattactcgaccatatgtttgaaaatgaagcatataaatacttatctacaggacaactagaacaaatcccacatattactgctgaaacactatatcatacatatcaatcaatgattaataatgatcaatgttctgtttatgttgtcggcaatgtagaacctgaaagtgttgagaaacaaatacgtgaaaaatttgcacttaaaccattcgataaacatcaattccaacattctactcatcatttacacgatgaagaagttgattatattgttgaatatgatgacgtggatcaagctaaattaaatatgggataccgttttccaacacaatatggacaaagtggatatgctgcctttgttgtatttaacatgatgtttggaggagatccttcatctgttttatttaatgaagtgcgagaaaagcaaagtttagcgtactctatacattcacaaattgatggcaaaaatggctatttatttgttttgagtggggtttcaagtgataagtacgaaactgcaaaagacactattataagtgaatttgaaaaaataaaagcaggagatttcactgaagaaaaattagagttagctaaaaaagtaatcatttctcatcgatatgaatctgaagatcgtccgaaaagtattatagagattatgcataaccaaatattattagagcaaccacaaagcaaagaaacatttataaatgatatacagaaggtaagtcgcgaagatattgtttctgttgctgaaaaagcatttttagatacaatctatgtgttgacaaaaggaggggataaataatgaaagagcgttattatgaattaatagacgaaagagtattcgaacaagaattagaaaatggtttacgattatttattatccccaaaccaggttttcaaaagacatttgtcacttacactacacaatttggttcattagataatcaattcaaaccccttggacaagaccaatttgttactgtacctgatggagttgctcactttttagaacataaattatttgaaaaagaagaagaagacttatttactgcgtttgctgaagataacgcacaagcaaatgcgtttacaagctttgatcgtacaagctacttgttcagtgcaactgataatattgaaaacaacattaaacgtttacttacaatggttgaaacgccttattttacaaaagaaactgttgataaagaaaaaggtattattgcagaagaaataaaaatgtatcaagagcaacctggatataaattaatgtttaatacattgcgtgcaatgtatcaacaacatccaatacgtgttgatattgccggtagtgtagaaagtatatacgatattacaaaagatgatttgtatctatgttatgaaacgttttatcatccatcaaatatggttttatttgttgttggcgatgtggatcctgaagcaatatgtcgaatagtaaaacaacacgaggatgctcgtaataaagttaaccaacccaaaatcgaacgaggacttgttgatgaaccggaggatgttaaagaagcatttgttactgaatctatgaaaattcaatcaccaagactaatgcttggttttaaaaataaaccattacaagaagcgcctcaaaaatatgtacaacgtgatttagaaatgtcattattctttgagttaatttttggggaagaaacagatttttatcagaatttattaaacgaaggacttatcgatgatacatttggttatcaatttgtactagagccgacgtatagtttttcaatcgtgacaagtgctactgaagaaccagataaattaaaaaaattattattagatgagttgcgtgataaaaaaggcaatttccaagatgcagaagcatttgaacttttgaaaaagcaatttataggtgaattcatatcaagtttaaactcacctgaatatattgctaatcaatatactaaattgtattttgaaggtgttagcgtgtttgacatgttagacattgttgaaaatatcacgttagatagtattaacgaaacgtcatcgttatatttaaatttagatcagcaagtcgatagtcgtttggagattaaaaagtaatgaaagcattagtattaggtggttctggttcaattggttctgagatagtcaaacaattattaactgatggatttgaagtttatgtgcaatattatcgtactgatataaatgaattaactagcaaatttaatgatgataaagttcgttttatacaagcggatttatctcaaacaattgatattgacaaaacatttggtgacattaaatcattagactgtttaatatatgcaagtggtcagtctttatatggtgttttacaagatatgaaagaccatgatattgatgcatgttatcagttaaatgtcttgcaattaattcgattatgtagatatttcgttgatgttttacgtcaaagtgccaatggaagaattattgtaatttcatcaatttggggtgagacaggagctagtatggaaactatttattcggcgatgaaaagtgcacaattaggtttcgttaaggcgcttagtcaagagcttgcactaacatcagtgacagtaaatgctatcgcacctggatttgtagccggtaatatggcaagtgagtggcaagaagatgaacttcaagcaatgataactgaattaccacaacagcgattggttttaccgagtgaggttgctcatacatgcgcctatttatatcacccaaatgctagaagtgttactggaactatacagaaagttaatggtgcttggtatatttaaaatatagaactatttttatgagcaaatgtttttatgattgatgttataatatgaatattacaatgaatcataatttgttaattaaacaaggggtgaggttcaccatgacagttgcagagaaaaaagaatggtacctagaatacgaaattgaaattaatagaccgggtcttttaggtgatgtatctagtttattaggtatgttaggtataagtattgttacaattaatggtgttgatcaaggtaaacgaggccttttaattaaaacagacaatcttgaaaaagttgaacgttttgagcaaatagctcgtggtataaatgaaattgaaataacaaagcttaaaaaaccagaattaagagaccgtcttgcagtaagacatggaagatatattgagcaagatgcaaaagataagaaaacctttcgatttgagcgtgaagatttaggcttgttagtagactttttagctgaattgttcaaagaagaaggtcataagttgattggcattagaggtatgccacgggttggtaaaactgaatcaattgttgcgggaagtgtttgtgcacataagagatggttatttattagttctactttaataaaacaaactgtacgtagctctctaattaaaggggaatatgatgccaatcatgtatacattattgatggtgcagttactgccagagaatctaatccaaaacatcaagagcttgttaacgaagttatgacgttaccatcaatcaaagtcgttgaacatccagatttatttgttgaaacaagtacttgtacaatggaagattttgactatattatcgaattgagagaaaatgaaaatcaagaaatacattacgaagaaatgaagaaacagacagtccaaagtaagaataatttagattttggagatccgtttggtggtggttttggtttcttcgagtaagtgtaaggaggctatgaattgaaaacggtcggtgaagcgctaaaaggtagacgtgaaaggttaggaatgactttaacagaattagagcaacgtactggaattaaacgtgaaatgctagtgcatattgaaaataatgaattcgatcaactaccgaataaaaattacagcgaaggatttattagaaaatatgcaagcgtagtaaatattgaacctaaccaattaattcaagctcatcaagatgaaattccatcgaaccaagccgaatgggacgaagtaattacagttttcaataataataaagacttagattataagagtaaatcaaaagagccaatacaattattagtaatcatgggtattacagttttaataactttattgttatggatcatgttagttttaatattttaacagaaataaattagtgagaaatgaggatgtataatgaatattccgaaccagattacggtttttagagtagtgttaataccagtttttatattgtttgcgttagttgattttggatttggcaatgtgtcatttctaggaggatatgaaataagaattgagttattaatcagtggttttatttttatattggcttcccttagcgattttgttgatggttatttagctagaaaatggaatttagttacaaatatggggaaatttttggatccattagcggataaattattagttgcaagtgctttaattgtacttgtgcaactaggactaacaaattctgtagtagcaatcattattattgccagagaatttgccgtaactggtttacgtttactacaaattgaacaaggattcgtaagtgcagctggtcaattaggtaaaattaaaacagcagttactatggtagcaattacttggttgttattaggtgatccattggcaacattgattggtttgtcattaggacaaattttattatacattggcgttatttttactatcttatctggtattgaatacttttataaaggtagagatgtttttaaacaaaaataaatatttgtttatactagatttcattttcatatggaatctagtttttttaatcccaattttagaaattagccacgcaattgtttataatgatatattgtaaaacaatatttgttcatttttttagggaaaatctgtagtagcatctgatacattgaatctaaaattgatgtgaatttttaaatgaaatacatgaaaaaatgaattaaacgatacaagggggatataaatgtcaattgccattattgctgtaggctcagaactattgctaggtcaaatcgctaataccaacggacaatttctatctaaagtatttaatgaaattggacaaaatgtattagaacataaagttattggagataataaaaaacgtttagaatcaagtgtacgtcatgcgctagaaaaatatgatactgttattttaacaggtggcttaggtcctacgaaagatgacttaacgaagcatacagtggcccagattgttggtaaagatttagttattgatgagccttctttaaaatatattgaaagctattttgaggaacaaggacaagaaatgacacctaataataaacaacaggctttagtaattgaaggttcaactgtattaacaaatcatcatggcatggctccaggaatgatggtgaattttgaaaacaaacaaattattttattaccaggtccaccgaaagaaatgcaaccaatggtgaaaaatgaattgttgtcacattttataaaccataatcgaattatacattctgaactattaagatttgcgggaataggtgaatctaaagtagaaacaatattaatagatcttatcgataaacagactaatcctacgattgcgcctttggcgggaagtcatgaagtatatattagattgactgcaaatgccgactcaaaagaacaagcacaatcattgattcaacctgttaaacaagaaattcttgatcgtattggagaatattattatggttcagatgacacattaattgagcaagctgtaataaagaaaattcatgaaccttttgtaatatatgatggtattactaatggtgctttatatcatcgattgaaagaagtggatttaaacgatgttctaaagggtatgattaatcacaatgaaaactttgttgatattaataaacctattgagcagcaattaaaagatgcagtgcaatttgttaataaattgtttaatgtgtcatcagcaattattctattagagtatgatggtgtagttcatataggctatgataataactttgaatttaaaactgagcaatttaaaatgtctaaatctagaaatttattaaagaacagaagtcaaaattatgcgctcataagattattaaattggcttagaacaacaaattaattgtattatcgataaaaatataagcacgtttgttcgtttttgcgttttgatttcaagattttatacgaacaaatattcgcaaaacacttgtattttattttgaatccttgtatagtattggtaagataattaaaagatagcaatttcaattaggaggtctcgctttggataacgatcgtcaaaaagctttagatacagtaattaaaaatatggagaaatctttcggtaaaggtgccgtaatgaagttgggtgacaatataggtcgccgagtttcaactacatcaactggttcagttacattagataatgcgctaggtgtaggtggctatcctaaaggacgaattattgaaatttatggtcctgaaagttctggtaagacaacagtagcgcttcacgctattgctgaagtacaaagtaatggcggggtggcagcatttatcgatgctgaacatgctttagatccagaatatgctcaagcattaggcgtagatatcgataatttatatttatcgcaaccggatcatggtgaacaaggtcttgaaatcgccgaagcatttgttagaagtggtgcagttgatattgtagttgtagactcagttgctgctttaacacctaaagctgaaattgaaggagaaatgggagacactcacgttggtttacaagctcgtttaatgtcacaagcgttacgtaaactttcaggtgctatttctaaatcaaatacaactgctattttcatcaaccaaattcgtgaaaaagttggtgttatgttcggtaatccagagactacaccaggtggacgtgcattaaaattctatagttcagtaagactagaagtacgtcgtgcagaacagcttaaacaaggacaagaaattgtaggtaatagaactaaaattaaagtcgttaaaaataaagtggcaccaccatttagagtagctgaagttgatattatgtatggacaaggtatttctaaagagggtgaacttattgatttaggtgttgaaaacgacatcgttgataaatcaggagcatggtattcttacaatggcgaacgaatgggtcaaggtaaggaaaatgttaaaatgtacttgaaagaaaatccacaaattaaagaagaaattgatcgtaaattgagagaaaaattaggtatatctgatggtgatgttgaagaaacagaagatgcaccaaagtcattatttgacgaagaatagtacacaaatttatatctatagttaaacttagcaaatatccttataggattgattgaaagtgatattcatctcataaagctagaataatatctaactttatgggatacactacaaatcgagactataaggttttttattttatttattattacattatcaatagttttataatcgagcttcaaaactttagaaaatagtagaaatagcattcaatatagtgcaaaagtgcaaattgataacttgacacttatctcctataaaccgtacaattaatttgtatgatttatatataatttcataaagtcatattgaatttcatataaagagcaaaccctagaaaaggaggtgtttgtgtgaatttattaagcctcctactcattttgctggggatcattctaggagttgttggagggtatgttgttgcccgaaatttgttgcttcaaaagcaatcacaagctagacaaactgccgaagatattgtaaatcaagcacataaagaagctgacaatatcaaaaaagagaaattacttgaggcaaaagaagaaaaccaaatcctaagagaacaaactgaagcagaactacgagaaagacgtagcgaacttcaaagacaagaaacccgacttcttcaaaaagaagaaaacttagagcgcaaatctgatctattagataaaaaagatgagattttagagcaaaaagaatcaaaaattgaagaaaaacaacaacaagtagatgcaaaagagagtagtgttcaaacgttaataatgaagcatgaacaagaattagaacgcatctccggtctcactcaagaagaagctattaatgagcaacttcaaagagtagaggaagaactgtcacaagatattgcagtacttgttaaagaaaaagaaaaagaagctaaagaaaaagttgataaaacagcaaaagaattattagctacagcagtacaaagattagcagcagatcacacaagtgaatcaacggtatcagtagttaacttacctaatgatgagatgaaaggtcgaatcattggacgagaaggacgaaacatccgcacacttgaaactttaactggcattgatttaattattgatgacacaccagaagcggttatattatctggttttgatccaataagaagagaaattgctagaacagcacttgttaacttagtatctgatggacgtattcatccaggtagaattgaagatatggtcgaaaaagctagaaaagaagtagacgatattattagagaagcaggtgaacaagctacatttgaagtgaacgcacataatatgcatcctgacttagtaaaaattgtagggcgtttaaactatcgtacgagttacggtcaaaatgtacttaaacattcaattgaagttgcgcatcttgctagtatgttagctgctgagctaggcgaagatgagacattagcgaaacgagctggacttttacatgatgttggtaaagcaattgatcatgaagtagaaggtagtcatgttgaaatcggtgtagaattagcgaaaaaatatggtgaaaatgaaacagttattaatgcaatccattctcatcatggtgatgttgaacctacatctattatatctatccttgttgctgctgcagatgcattgtctgcggctcgtccaggtgcaagaaaagaaacattagagaattatattcgtcgattagaacgtttagaaacgttatcagaaagttatgatggtgtagaaaaagcatttgcgattcaggcaggtagagaaatccgagtgattgtatctcctgaagaaattgatgatttaaaatcttatcgattggctagagatattaaaaatcagattgaagatgaattacaatatcctggtcatatcaaggtgacagttgttcgagagactagagcagtagaatatgcgaaataatttttgtctccctcacaaattagtgagggagcttttttaagttgtagtcttaatctagttagacagcactttatcggtaataactatattaaacagtagttatttgaaagtaagacggaccttatattaaataagaagttattgcttttaataaaaatgttttaggcttcgtaattactatatttatattatgtaaacctataaagatgattggttttctatccaataaaaaagaagagaagatgtaacacatcttctcttctgcaatattaattaggatttatttctaagttgagttattttaattgtaaatctgttttctttaattcttttataacttctgcagtatcataacaatttgttgcaattgttgaatatctctctgctaaacgatatgcattaatgtaaagctttaaactttctttagctatatcctctgcatcttcgaattttgatgggttagacataaccactaattctgcaaatttttctggatcaatattaatagacatgtatttatttacaactcctatttattttgatgtcttaatactaacatattgaagttttcagacaaagtaatgtctctctataattgaagaaaaataattcaaagaatttaatatttactttaaatattagaacgtatgaattaaactagtatttatgagaggatgaacaaaacatgagaataatgtttataggggatatcgtaggtaaaattggacgagacgcaattgaaacgtacatacctcaactgaagcaaaagtataaaccaacagttacaattgtaaatgctgaaaatgcagcacatggtaaaggtttgactgaaaaaatatataaacaattactaagaaatggtgtagatttcatgactatgggtaatcacacatatggtcaacgtgaaatttatgattttatagatgaagcaaaacgactagtaagaccagcgaattttccggatgaagcgccgggaattggtatgagatttatacaaattaatgatattaaacttgcagttattaatctgcaaggaagagcgtttatgccagatattgatgatccttttaaaaaggcagatcaattagtcaaggaagcacaagaacaaactccgtttatatttgttgattttcatgcagaaacaacttctgaaaagtatgcaatgggatggcatttagatggtagagctagcgctgttgttggaacgcatacacacattcaaacagcagatgaacgtattttaccaaaggggacagggtatataacggatgttggtatgacaggtttttatgatggcattttaggaataaataaaacagaggtaattgagcgttttatcactagtttgccacaaagacatgttgttccaaatgaaggtagaagtgtattatctggtgttgttattgatttagacaaagaaggtaaaacaaagcacatcgaacgtatattgataaatgatgaccatccattttcaacattttaaaattacgtaagtaaacattcgaattggaccctatcgtccattagtatgaatttaatatagtaccactgtttacatagtaaatcggtggttctttttgttatcatttaatatgaaatatatccataggaggcatataactatgaaaccacaattatcgtggaaagttggcggtcaacaaggcgaaggtattgaatcaactggggaaatcttcgctacggctatgaatagaaaaggatattatttatatggatatagacatttttcaagtcgtatcaaaggtggacatacgaataataaaattagagtttctacgacgcctgttcatgcaattagtgatgatttagatattttgattgcatttgaccaagaaacaattgatgttaaccatcatgaaatgagagaagacagtattattttagctgatgccaaggctaaacctgtgaaaccagaaggatgtcatgcacagcttattgaattaccttttacagcaaccgctaaagaattaggtacagcattaatgaaaaacatggttgcaataggtgctactagcgcattgatgaatttgaatacaaatacatttgaagaacttattactaatatgttttctaaaaaaggtgacaaggtagttgaagtcaatatccaagcattaaacgaaggttatcaattaatgcaatctcgcttacctgaaatctacggggactttgaattagagtcaacagatgcactaccacatctatatatgattggtaacgatgccattggattaggtgcaattgctgcaggttcacaatttatggcggcatatcctattacacctgcgtctgaagttatggaatatatgattgccaatatatctaaagtaaacggagcggttattcaaacagaagatgaaattgctgctgtaactatggctattggtgcaaattatggtggagtcagagcgtttacggctagtgctggtccaggtttatctttaatgatggaagcaattggattatctggtatgactgaaacgccattagtcattattaatacccaacgaggtggaccttctactggattacctacgaaacaagaacagtcagatttaatgcaaatgatttatggtacacatggtgatattccaaaaattgttgtagcaccaacagatgcagaagatgcattttatttaactatggaagcatttaatttagcagaacaatatcaatgccctgttatagttctaagtgatttgcaattatctttaggtaaacaaactgttgaaaaattagattataatcgtattgaaattaaacgtggtgaaatcattcaatctgatattgaacgtgaagaagatgataaaggttatttcaagcgttatgcgttaacatccgatggtgtttctcctagacctatccccggtgttaaaggaggtattcatcatataactggtgtggaacacaatgaagaaggtaaacctagtgaatctgcgtcaaatagacaacaacaaatggaaaaacgaatgcgtaaaattgagcagttactaattgaatcgccagtagaagctaacttacaacatgaggatgcagatattctttatatcggttttatttctacaaaaggtgcaattcaagaaggtagtaaccgtttgaatcaacaaggcataaaagttaacactatacaaattagacaattgcatccattcccaacaagcgttattcaagatgcagttaataaagcgaagaaagtcgttgtagtggagcacaattatcaaggacaattggctagtattataaaaatgaatgtcaatattcatgataagattgaaaattatacaaagtatgatgggacacctttcctaccacatgaaatcgaagaaaaaggcaaaataattgctactgaaataaaggagatggtatagatggcgacatttaaagattttagaaataatgttaagcctaactggtgccccggatgtggcgatttctcagtacaagctgcaattcaaaaagcagccgcaaatatagggttagaacctgaagaagtagctatcatcaccggtataggatgttctggccgtctttcaggatatattaattcttatggcgttcattctattcacggacgtgcattacctttagctcaaggtgtaaaaatggcgaataaagatttaactgttattgcatcgggaggagatggtgatggttatgctataggtatggggcatacaatccatgctttaagaagaaatatgaacatgacgtatatagtcatggataatcaaatttatggtttgacaaagggacaaacatcgccgtcatcagcagtaggatttgttactaaaacaacgccaaaaggtaatatagaaaaaaatgttgcgcctttagaattagtattatcatctggtgccacatttgtagcccaaggtttttcaagcgatattaaaggattaacaaaactaattgaagatgcaattaatcatgatggattttcattcgttaatgtcttttcaccatgtgtgacttataataaaattaacacatacgattggtttaaagaacatttaacaagtgttgatgacattgaaaattatgattctacagataaacaattagcgactaaaactgttattgaacatgaatctttagtaactggtattgtttatcaagataaagaaacaccatcatatgaatctcaaattaaagagttagatgatacaccacttgctaaaagagatatcaaaattactgaagacaccttcaatgcattaactgaacaatttatttaataattaaaactgagtcgtataaatgtatttataacagatccatttatgctactcagttttttactattacaaaaaataaaggagtttttaaaaatgaaagacacattaatgagtatacaaataattcctaaaacaccaaacaatgacaatgttataccttacgtagacgaggcgattaaaataattgacgaatctggtttgcattttagagtaggtccgttagaaacgacagtacaaggaaatatgaatgaatgtttaattttaatacaatcattaaatgaacgaatggtggaacttgaatgtccaagtattattagccaagttaagttttatcatgtgccagatggcatcactattgaaactttaactgaaaaatatgatgaataacattaaaagtgaagtaaactggatttgaattggcttgttagagatgacgtataactttaactgtttttgcactttatagttaaatttaatataattattaaatgatacgggcaaatagaaaggattttgtaaagtgaacgaagaacaaagaaaagcaagttctgtagatgttttagctgagagagataagaaagcagaaaaagattatagtaaatattttgaacatgtttatcagccgcctaatttaaaagaagcgaaaaaaagaggtaaacaagaagttcgttataatagagatttccaaattgatgaaaaatatcgcggtatggggaacgagcgtacatttttaattaaaacatatggatgtcaaatgaatgcacatgacactgaggtcattgctggtatacttgaagcattaggctatcaagcaacgactgatattaacactgcagatgttattttaattaatacatgtgcgattagagaaaatgccgagaacaaagtgtttagtgaaataggtaatttgaagcatttgaaaaaagaacgacctgatattttaatcggtgtttgtggttgtatgtcacaagaagagtcagtagtgaataaaattttaaaatcgtatcaaaatgtagatatgatatttggtacacataatattcatcatttaccagaaattttagaagaagcatacttatctaaagcaatggttgttgaagtatggtctaaagaaggagacgttattgaaaatcttccaaaagtccgtgaaggcaacattaaagcatgggtcaatattatgtatggttgtgataagttttgtacatattgtattgttccatttacaagaggtaaagaacgaagccgtagacctgaagacattatagatgaagtacgtgaacttgctcgtgaaggttacaaagaaataacgcttttaggtcaaaatgtaaattcttatggtaaagatttacaggatatagaatatgacttaggagatcttttacaagcaatttctaaaatagcgattccaagagttcgtttcacaacaagtcatccttgggactttacagatcacatgattgatgttatttcagagggtggtaatatcgttccgcatatccacttgccagttcaatctggaaataatgcagtattaaaaataatgggtagaaaatatacacgagaaagttatttggatttagtaaaacgaatcaaagatagaattcctaatgtagcattaactacagatattattgtagggtatccaaatgaatcagaggaacaatttgaagaaactttaactctgtatgatgaagttggttttgaacatgcatatacgtacttgtattcacaacgtgatggtacgcctgctgctaaaatgaaagataatgtacctttaaatgtcaaaaaggaacgattgcaacgtttgaataaaaaagttggtcattattcacaaatagctatgagtaagtacgaaggacaaactgtaacagtactttgtgaaggaagtagtaaaaaagatgatcaggttcttgctggctacactgataaaaataagctagttaatttcaaagcgcctaaagaaatgattggtaaactagtggaagtacgaatagatgaagctaaacagtattcattaaatggcagttttataaaggaagtagagccggaaatggtgattcaataaatgtataataaagatgacgtgttgaaccaagcggataatattgcaaataaaattaaaaatttggatactatcaaaacatatcaacaaattgaagcacagattcatcagaaccaaacgataaagactaaaatggatatgttaaaaaagcatcaaaaacaagcagtaaactttcaaaattacgggaaacaaaatgcgctagaacagtcggaacataccattcagagtatagaagcagaaataaatacattgcccatagttgaacagtttcaaacttcacaatatgaagcgaatcaattattgaaaatgtttgtatcaacaatggaaacacgtttaaatgaccataataaagccaagcatagtgattaattacaaacaaaaaggagaacaatcatatgaaatcaagaaaactggctataactgcacttttaattgcaataaatgttgtattaagcagtattatcatcattcctctaggaccagttaaggcagcaccagtacagcattttgtaaatgtattaagtgcggtcatagtaggtccttggtatggattagctcaagcgcttatatcatcaattttaagagttctttttggtactggtacagcttttgcatttccgggtagtatgattggagttttattggctagtatgttttacatatatcgtaaacatatatttatggccgcggtcggtgaagtacttggaactggtgtcatcggaagtttaatttgtataccattagcatatttccttgggcttcaagacttcttcattaaaccgttaatgattacgttcatagtctcaagtgctatcggatctattataagttatttcttattaattactctaaaaaaacgtggtattcttcaaaggtttataaaataattttatgatatatgatttcaaacagagtcattgttcattttaatattgaacgcccttacttaattaaatgtcttgaatgttagaattttaatttaattctaaacatgctattgacacattttattaggtttgaggcgttttcttatacatttaagatgcttcgtgattatatggtatgaataggtttgtaaaagtaagtatgttaaaatgtataagttaaataattaataattaaaaagcttacaaacgaatatattgtaaagacaaattttaaaaagagacaagggttgtgaagaaataatatgtctaatgttacaccaatgatgcagcaatatttaaaaataaaatcagaataccaagattgcttattattttttagactaggtgatttctatgaaatgttttatgaagatgccaaggaggcatcacgtgtacttgaaattactttaactaaaagagatgctaaaaaagaaaatccaattccgatgtgtggtgttccgtatcattctgcagatagttatatagatacacttgttaataatggatataaagtagctatttgtgaacagatggaagatccgaaacaaacgaaaggtatggttagacgtgaggtagtaagaattgtgactccaggaactgtgatggagcaaggtggtgtagatgataaacaaaataactatattttaagttttgttatgaatcaacctgaaattgcgcttagttactgtgatgtttctactggcgaattaaaggttacacattttaatgatgaagcgactttattaaatgaaattacgacgataaaccctaacgaagttgttatcaatgacaatatttccgataatttaaaaagacaaattaatatggtgacagaaacaataacagtcagggaaacgttatcatcagaaatctatagtgtgaatcaaactgaacataaattaatgtatcaagcgacacaattattgctagattatattcatcatacacaaaaacgtgatttatcgcatatcgaggatgttgttcaatatgcagctatagattatatgaaaatggatttttatgctaagagaaaccttgagttaacggaaagcattcgattaaaatcaaaaaaaggaacgctactttggctaatggacgaaacgaaaacaccaatgggagcacgccgcttaaaacaatggatagatagaccactaataagtaaagaacaaattgaagcacgattagatatcgttgatgaatttagtgctcatttcatagaaagagacaccttaagaacatatcttaatcaagtgtatgatattgaacgtcttgttgggcgtgttagttacggaaatgttaatgcgagagatttaattcaacttaaacattccatttctgaaataccgaatattaaagcattactaaattcactggatctggactaaaaggcatgcaatttcataatcaaagagagcggaaaaagtagaacgaatgatgatattgaccatgagcgaacacgtgaaaattatgatttgaaaaatgataaaaatattgattacaacgaacgtgtcaaagaaattattgaatcacaaaaaacaggtacaagaaaaacggaggaaagatgctgttcttgtaaatgagttgctagtaacatctgaccgagatttttttgagcaactggatcagtacaagaaagatactgtatttcataaacaggaactgcaagaagttaaggatgagttacagaaggcaaataagcagttacagagtggaatagagcatatgaggtctacgaaaccctttgattatgaaaatgagcgtacaggtttgttctctggacgtgaagagactggtagaaagatattaactgctgatgaatttgaacgcctgcaagaaacaatctcttctgcagaacggattgttgatgattacgaaaatattaagagcacagactattacacagaaaatcaagaattaaaaaaacgtagagagagtttgaaagaagtagtgaatacatggaaagaggggtatcacgaaaaaagtaaagaggttaataaattaaagcgagagaatgatagtttgaatgagcagttgaatgtatcagagaaatttcaagctagtacagtgactttatatcgtgctgcgagggcgaatttccctgggtttgagaaagggtttaataggcttaaagagaaattctttaatgattccaaatttgagcgtgtgggacagtttatggatgttgtacaggataatgtccagaaggtcgatagaaagcgtgagaaacagcgtacagacgatttagagatgtagaggtacttttatgccgagaaaactttttgcgtgtgacagtccttaaaatatacttagagcgtaagcgaaagtagtagcgacagctattaactttcggttgcaaagctctaggatttttaatggacgcagcgcatcacacgcaaaaaggaaattggaataaatgcgaaatttgagatgttaattaaagacctttttgaggtctttttttcttagatttttggggttatttaggggagaaaacataggggggtactacgacctcccccctaggtgtccattgtccattgtccaaacaaataaataaatattgggtttttaatgttaaaaggttgttttttatgttaaagtgaaaaaaacagatgttgggaggtacagtgatggttgtagatagaaaagaagagaaaaaagttgctgttactttaagacttacaacagaagaaaatgagatattaaatagaatcaaagaaaaatataatattagcaaatcagatgcaaccggtattctaataaaaaaatatgcaaaggaggaatacggtgcattttaaacaaaaaaagatagacagcactggcatgctgcctatctatgactaaattttgttaagtgtattagcaccgttattatatcatgagcgaaaatgtaataaaagaaactgaaaacaagaaaaattcaagaggacgtaattggacatttgttttatatccagaatcagcaaaagccgagtggttagagtatttaaaagagttacacattcaatttgtagtgtctccattacatgatagggatactgatacagaaggtaggatgaaaaaagagcattatcatattctagtgatgtatgagggtaataaatcttatgaacagataaaaataattaacagaagaattgaatgcgactattccgcagattgcaggaagtgtgaaaggtcttgtgagatatatgcttcacatggacgatcctaataaatttaaatatcaaaaagaagatatgatagtttatggcggtgtagatgttgatgaattattaaagaaaacaacaacagatagatataaattaattaaagaaatgattgagtttattgatgaacaaggaatcgtagaatttaagagtttaatggattatgcaatgaagtttaaatttgatgattggttcccgcttttatgtgataactcggcgtatgttattcaagaatatataaaatcaaatcggtataaatctgaccgatagattttgaatttaggtgtcacaagacactcttttttcgcaccagcgaaaactggtttaagccgactgcgcaaaagacataatcgattcacaaaaaataggcacacgaaaaacaagttaagggatgcagtttatgcatcccttaacttacttattaaataatttatagctattgaaaagagataagaattgttcaaagctaatattgtttaaatcgtcaattcctgcatgttttaaggaattgttaaattgattttttgtaaatattttcttgtattctttgttaacccatttcataacgaaataattatacttttgtttatctttgtgtgatattcttgatttttttctacttaatctgataagtgagctattcactttaggtttaggatgaaaatattctcttggaaccatacttaatatagaaatatcaacttctgccattaaaagtaatgccaatgagcgttttgtatttaataatcttttagcaaacccgtattccacgattaaataaatctcattagctatactatcaaaaacaattttgcgtattatatccgtacttatgttataaggtatattaccatatattttataggattggtttttaggaaatttaaactgcaatatatccttgtttaaaacttggaaattatcgtgatcttccttcaggttatgaccatctgtgccagttcgtaatgtctggtcaactttccgactctgagaaacttctggaatcgctagagaatttctggaatgggattcaggagtggacagaacgacacggatatatagtggatgtgtcaaaacgcataccattttgaacgatgacctctaataattgttaatcatgttggttacgtatttattaacttctcctagtattagtaattatcatggctgtcatggcgcattaacggaataaagggtgtgcttaaatcgggccattttgcgtaataagaaaaaggattaattatgagcgaattgaattaataataaggtaatagatttacattagaaaatgaaaggggattttatgcgtgagaatgttacagtctatcccggcaatagttacccttattatcaagataagaaagaaaaggatttttcgctacgctcaaatcctttaaaaaaacacaaaagaccacattttttaatgtggtctttattcttcaactaaagcacccattagttcaacaaacgaaaattggataaagtgggatatttttaaaatatatatttatgttacagtaatattgacttttaaaaaaggattgattctaatgaagaaagcagacaagtaagcctcctaaattcactttagataaaaatttaggaggcatatcaaatgaactttaataaaattgatttagacaattggaagagaaaagagatatttaatcattatttgaaccaacaaacgacttttagtataaccacagaaattgatattagtgttttataccgaaacataaaacaagaaggatataaattttaccctgcatttattttcttagtgacaagggtgataaactcaaatacagcttttagaactggttacaatagcgacggagagttaggttattgggataagttagagccactttatacaatttttgatggtgtatctaaaacattctctggtatttggactcctgtaaagaatgacttcaaagagttttatgatttatacctttctgatgtagagaaatataatggttcggggaaattgtttcccaaaacacctatacctgaaaatgctttttctctttctattattccatggacttcatttactgggtttaacttaaatatcaataataatagtaattaccttctacccattattacagcaggaaaattcattaataaaggtaattcaatatatttaccgctatctttacaggtacatcattctgtttgtgatggttatcatgcaggattgtttatgaactctattcaggaattgtcagataggcctaatgactggcttttataatatgagataatgccgactgtactttttacagtcggttttctaaaacgatacattaataggtacgaaaaagcaactttttttgcgcttaaaaccagtcataccaataacttaagggtaactagcctcgccggaaagagcgaaaatgcctcacatttgtgccacctaaaaaggagcgatttacatatgagttatgcagtttgtagaatgcaaaaagtgaaatcagatcgccaagcttgcatgcctgcaggtcgactctagaaatctatagtgtgaatcaaactgaacataaattaatgtatcaagcgacacaattattgctagattatattcatcatacacaaaaacgtgatttatcgcatatcgaggatgttgttcaatatgcagctatagattatatgaaaatggatttttatgctaagagaaaccttgagttaacggaaagcattcgattaaaatcaaaaaaaggaacgctactttggctaatggacgaaacgaaaacaccaatgggagcacgccgcttaaaacaatggatagatagaccactaataagtaaagaacaaattgaagcacgattagatatcgttgatgaatttagtgctcatttcatagaaagagacaccttaagaacatatcttaatcaagtgtatgatattgaacgtcttgttgggcgtgttagttacggaaatgttaatgcgagagatttaattcaacttaaacattccatttctgaaataccgaatattaaagcattactaaattctatgaatcagaatactcttgtacaagttaatcaactagaaccccttgatgatttacttgatatattagaacagagtttagtagaagaaccaccaatttcagttaaagatggcggactattcaaagttggttttaatacgcaattagatgaatatcttgaagcttcaaaaaacggaaaaacatggttagcagaattacaagccaaagaaagacaacgtacaggaataaaatcattgaaaataagctttaataaagtgtttggttattttatagaaataacacgtgccaacttgcaaaattttgaaccaagtgaatttggttatatgaggaagcaaacgttatcgaatgctgaacgttttataactgatgaacttaaagaaaaagaagatatcattttaggtgcggaagacaaagccatcgaattagaatatcaattatttgttcagctacgtgaagaagttaaaaaatatactgaacgtttacaacaacaagctaaaattatttcagagctagattgtttacagagctttgcagaaattgctcaaaaatataattacactaggccttcatttagtgaaaataaaacattagaattagtggaatctaggcacccagtagtggaaagagtaatggattataatgactatgtgcctaataattgtcgattagataatgaaacatttatatatttaattacaggtccgaatatgtctggtaaatcgacatatatgagacaagttgccataattagtataatggcccaaatgggagcttatgtcccttgtaaagaggcagtgttacctatatttgatcaaatattcactagaataggtgcggcagatgatttggtttcaggtaagagtacgtttatggtagaaatgctagaagcacaaaaggcattaacttatgcaacagaggatagtttgattattttcgatgaaattggacgtggtacttcaacgtatgacggtttagctttagcgcaggcaatgatagagtatgtagctgaaacatcacatgctaaaacgttattttcaacacattatcatgaattgacaacattagatcaagcattaccaagtctaaaaaatgttcacgtcgctgctaatgaatataaaggtgaacttatattcttgcataaagtcaaagatggtgcagttgacgatagttatggtattcaagttgcgaaattagctgatttacctgaaaaagttattagcagagcacaagtgattctaagcgagtttgaagcgtctgctggtaaaaaatcatcgatatcaaatttaaaaatggtcgaaaatgaacctgaaattaatcaagaaaatttaaacttaagtgttgaagaaacaactgatactttatctcaaaaagactttgaacaagcatcatttgatttgtttgaaaatgatcaaaaaagcgagattgaactacaaattaaaaatttgaatttatctaatatgacaccaattgaggcattggtgaagttaagtgaattacaaaatcaattaaaatagaggtgttgcaaaatggggaaaattaaagaactccaaacctcattagcaaataaaatcgcagcaggtgaagtagttgaaagaccgagttctgttgtgaaagaactgttggaaaatgctatagatgcaggcgctacagaaataagcattgaagtagaggaatctggcgtccaatctattcgcgtagtcgataatggaagcggaattgaagcggaagacttaggattagtatttcatagacatgcgactagtaaattagatcaagatgaagatttatttcatattaggacattaggattccgtggtgaagcactagccagtatttcatcagttgctaaagtaacattgaagacttgcacggataatgctaatggaaatgaaatatatgtagaaaatggtgaaatattaaatcataagcctgcaaaagcgaaaaaaggaacagatatacttgtagaatcattattttataatacaccagcacgtttaaaatatattaaaagtttatacactgaactaggtaaaataacagatattgtcaacagaatggcaatgagccatccggacattcgaatagcactcatttcagatggcaaaacaatgttaagtacaaatggttcaggacgaactaatgaagtgatggcagagatttatgggatgaaagttgcacgagatttagtacatatatctggagatacaagtgattatcacattgaaggttttgttgcaaagcctgaacattctagaagtaataagcactatatttctatttttattaatggacgatacattaaaaactttatgctaaataaagcgattttagaaggctatcatacactcttaacaataggtaggttcccgatttgttatattaatattgaaatggatccaatcttagtagacgtaaatgttcatccaacaaaactagaagtgcgtttatcaaaagaagagcaactataccaattgattgtgagcaaaatacaagaagcatttaaagaccgtatattaattcctaaaaataacttggattatgtgccaaaaaaaaataaagtattacattcattcgaacaacaaaaaatcgaatttgaacaaagacaaaacacagagaataaccaagagaagacgttttcatctgaagaaagtaacagtaagccatttatggaagaaaatcaaaacgatgagatagttataaaagaagattcatataatccattcgtaacgaaaacatctgaaagtttaatagctgatgatgaatcttctggttataataatacacgtgaaaaagatgaagactacttcaaaaaacaacaagaaattttacaagaaatggatcaaacatttgattcaaatgatggtacaactgtgcaaaattatgagaataaagcgtctgatgattattatgatgtaaacgatattaaaggaacaaaaagtaaagaccctaaacgaagaattccatatatggaaattgttggacaagtacatggaacgtatattattgctcaaaatgaatttggcatgtacatgattgaccagcatgcagctcaagaaagaataaaatatgaatattttcgagataaaataggtgaggttaccaatgaagtacaagatttattaatcccgttaacatttcatttttcaaaagatgaacaattagtcattgatcaatataaaaatgagcttcaacaagtaggtatcatgttagaacattttggtggtcatgattatattgtaagtagctatccagtttggttccctaaagatgaagtagaagaaattattaaagatatgattgagctaattttggaagagaaaaaagtagatatcaaaaaattacgtgaagatgtagcaatcatgatgtcatgtaaaaaatccattaaagcgaatcattatttacaaaaacatgaaatgtctgatttaattgatcaattaagagaagcggaagatccatttacatgtccacatggtcgtccaataatcattaatttttcaaaatacgaattagaaaaattatttaagcgtgtgatgtagagaggatgaatcaagtgaataacaacatattgcctgctataagaaacattaaagatttagagaaactgattaaaacagactataaaatgtgtgtgcttctagatatgcatataggacatataaaaagtattatggaattgctgaagcaaaatcatatagagtgttttattcatatagatttgataaaaggtttaagccacgatgaatttgcaagtgaatttattattcagcaatacaagccaaaaggtatcgtatcgactaaatctaaagtaataaaaaaagctaaatcattaaatactttaacgatttttagagtatttattattgatagtcaagcattgaaacgcagtatagatttgataaaaaaagttgaacctgattttgttgaagtacttccaggtgttgcgagtaaagcgattcatcatattcagaaagaaacaaacacacaagtcattgcaggtggcctaattaatacaatagatgaagtcaatgaagctgttaaaaatggagcgaaatatgtaactactagttatgataaactttggtaaatcataagtctgcaaaaatttcatttttcacgagatttagtcatataacataataaaaaagccgttttcatatgggatatgcagtaggtatcaaacaaaaaataatcaaataaaataattagcacctctaaaacgattaaaatcattaaagttttagaggtgtttattagtaaaaaatgcaactagtcataaaaaatatggctgaagaatgtcaattaaacaaaagagcgtcataaataaattagttaggattggtatttctagttttcaaattaaactacttttataaagacttgaaaaattaaatttgacaaaatttttacaaaaaccattgacaacgctttcatatcgatagtatcataacaaatataataaaagttaatacatagaatagagacgggagatttctacgagccaaactgctagtgtaggaatctctttgtctttttgggaggacatttaatatgaatgtatatttagcagaattcctaggaactgcaatcttaatcctttttggtggtggcgtttgtgccaatgtcaatttaaagagaagtgctgcgaatggtgctgattggattgtcatcacagctggatggggattagcggttacaatgggtgtgtttgctgtcggtcaattctcaggtgcacatttaaacccagcggtgtctttagctcttgcattagacggaagttttgattggtcattagttcctggttatattgttgctcaaatgttaggtgcaattgtcggagcaacaattgtatggttaatgtacttgccacattggaaagcgacagaagaagctggcgcgaaattaggtgttttctctacagcaccggctattaagaattactttgccaactttttaagtgagattatcggaacaatggcattaactttaggtattttatttatcggtgtaaacaaaattgccgatggtttaaatcctttaattgtcggagcattaattgttgcaatcggattaagtttaggcggtgctactggttatgcaatcaacccagcacgtgatttaggtccgagaattgcacatgcgattttaccaatagctggtaaaggtggttcaaattggtcatatgcaatcgttcctatcttaggaccaattgccggtggtttattaggtgcagtggtatacgctgtattttataaacatacatttaatattggttgtgcaattgcaattgttgtagttattattactttgattttaggttacattttaaataaatcatcaaaaaaaggtgatatcgaatcaatttactaaaataaaaagaaacgtaaatagcataatttaacatgtttgattcatggattatgctattttttcgccaaaatttaacagattttgtacaatgggttagcgattattttttaataaaggagatactactaatggaaaaatatattttatctatagaccaaggaacaacaagctcaagagcgattttattcaatcaaaaaggggaaattgcaggggtagcacaacgtgagtttaagcaatattttccacaatcaggttgggttgaacatgatgcaaatgaaatttggacatctgtgttagctgtaatgacggaagtaattaatgaaaatgatgttagagctgatcaaattgcaggtatcggtattacaaaccaacgtgaaacaacggttgtttgggacaaacatactggccgcccaatttatcacgcaattgtttggcaatcacgtcaaacacaatcaatttgttcagaattaaaacaacaaggatatgaacaaacatttagagataagacaggattacttttagatccgtattttgcaggtacaaaagttaaatggattctagacaatgttgaaggtgcacgagaaaaagcagaaaatggcgatctattatttggaacgattgatacttggttagtatggaaattatcaggaaaagctgcgcatattactgattattcaaatgcgagtcgtacattaatgtttaatatccatgatttagaatgggacgatgagttattagaactacttacagtacctaaaaatatgttgccagaagttaaagcttcgagtgaagtatatggtaagacaattgattaccacttctatggtcaagaagtaccaatcgctggagtagctggtgatcaacaagcagcattatttggacaagcttgcttcgaacgtggtgacgtgaaaaacacatatggaactggtggcttcatgttaatgaatacaggtgacaaagcggttaaatctgaaagtggtttattaacaacaattgcttatggtattgatggaaaagtaaattatgcgcttgaaggttccatctttgtttcgggttcagcaatccaatggttacgtgatggattaagaatgattaattcagcaccacaatcagaaagttatgcgacacgagttgactctactgagggtgtttatgttgttccagcttttgtaggtttaggaacaccatattgggattctgaagcacgtggtgcgattttcggtttaacacgtggaactgaaaaagagcactttatccgtgcaactttagaatcactatgttaccaaactcgtgacgttatggaagcaatgtcaaaagactctggtattgatgtccaaagtttacgtgtcgatggtggtgcagttaaaaataactttattatgcagttccaagcagacattgttaatacttctgttgaaagacctgaaattcaagaaactacagctttaggtgctgcatttttggcaggtttagcagttggattctgggagagtaaagatgatatcgctaaaaactggaaattagaagaaaaattcgatccgaaaatggatgaaggcgaaagagaaaaattatatagaggttggaaaaaagctgttgaagcaacacaagtttttaaaacagaataaacttgtagattagacttttgtataaacattgtgatacaatcaatttaagttaatatttgaatcgagaagcgagagatttgttcgaacatgtacaattgaaggattgtttatgtgggacaagtctctcgtttttacattttttaggaggcgttttggaatggcattgtctacttttaagagagaacatattaaaaagaatttaagaaatgatgaatatgatttagtaattattggtggcggtattacaggtgcaggtattgcactagacgcgagtgaaagaggaatgaaagttgcattagttgaaatgcaagactttgcacaaggaacaagctcaagatctacaaaattagtccatggtggtttgcgttacttaaaacaattccaaattggagtagttgccgaaactggtaaagaacgtgcgattgtttatgaaaatgggcctcatgttacgactccagagtggatgcttttaccaatgcataaaggtggaacatttggtaaattctcaacatcaattggtttaggaatgtatgatcgtttagcaggtgttaagaagtctgaacgtaaaaaaatgttatctaaaaaagaaactttagctaaagaaccattagttaaaaaagaaggtctaaaaggcggcggttactatgttgaatatcgtactgacgatgcgcgtttaactattgaagttatgaagcgtgctgctgaaaaaggcgcagaaattatcaactatactaaatctgaacacttcacttatgataaaaatcaacaagtaaatggtgttaaagttatagataaattaactaatgaaaattatacaattaaggctaaaaaagtggttaatgcagcaggtccatgggttgatgatgttagaagtggtgattatgcacgcaataataaaaaattacgtttaactaaaggtgtacatgttgttattgatcaatcaaaattcccattaggtcaagcagtatactttgatactgaaaaagatggaagaatgatttttgcaattccacgtgaaggaaaagcgtatgtaggtactacagatacattctatgacaatatcaaatcttcaccattaactacacaagaagacagagactatttaatcgatgcgattaattacatgttccctagtgttaatgttacagatgaagatattgaatcaacatgggcaggaattagaccattaatttacgaagaaggcaaagacccttctgaaatctctcgtaaggatgaaatttgggaaggtaaatcaggtttattaactattgcaggtggtaaattaacaggctatcgtcacatggctcaagacattgttgatttagtatctaaacgcttgaaaaaagactacggtttaacatttagtccatgtaatacaaaaggtctggcaatttcaggtggcgatgtaggtggtagcaagaactttgatgcgtttgtagagcaaaaagtagatgtagctaaaggattcggcattgatgaagatgttgcaagacgtttagcatctaaatatggttcaaatgttgatgaattgttcaacattgcgcaaacatctcaataccatgatagcaagttaccattagaaatttatgtagaacttgtttatagtattcaacaagaaatggtatacaaacctaacgatttcttagttcgtcgttctggtaaaatgtatttcaatattaaagatgtattagattataaagatgctgtcatcgatattatggcagatatgcttgattactctccagctcaaattgaagcatatactgaagaagttgagcaagcaattaaagaagcgcaacatggaaataatcaaccagcagttaaagaataattaatttgtacaatcataaactggtgtcctgttttaagggcatcagtttttttatacgagatacattagtcaattgaaactatgcatcactaaatgtatgataataataaaagcgaatataaaagcgttgttattaaaggtgtgagatgatgactgaaaaacaatttaaattaactgtacaagataatacgaatattgaagttaaagtgaattttacagatgtagattcaaaaggaattattcatatatttcatggtatggctgaacatatggaacgttacgataaattagcacatgcactttcaaagcatggcttcgatgtgatacgtcataatcatcgaggacatggtattaatattgatgaatcaacaagagggcattacgatgatatgaaacgagttatcggtgatgcctttgaagtagcgcaaacagtgagaggcaatgttgataaaccatacattataatcggacattcaatgggatccgttatagctagattgtttgtagaaacatatccgcaatatgttgatggtctaattttaagtggtactggtatgtattcattatggaaaggtttaccaaccgttaaagtgttacaactgattacaaaaatttatggtgctgagaaacgagttgaatgggttaaccagttagtatcaaatagttttaataaaaaaatacgtccattacgtacacaaagtgattggatttctagtaatccaattgaagtagataactttattaaagatccatatagtggatttaatgtgtcaaatcaattattatatcaaacagcctattatatgctacatacatcacaattaaaaaatatgaaaatgttaaatcatgccatgcctatattattagtttcaggatatgacgatcctttaggtgattatggtaaagggattttaaaattggcgaatatatatagaaaagctggcattaaaaatgttaaagtgaatctttatcatcataaacgtcatgaagtgttatttgaaaaagatcatgacaaaatttgggaagacttgtttaaatggttgaatcaattttataaaaaataaagaaagtggaattaaatatgaataaaaataagccttttattgtagtaattgtggggccaactgcttcaggtaaaacagagcttagcatcgaactcgcgaagcgtatcaatggtgaaatcataagcggtgactctatgcaagtctacaaacatatgaatattggaactgcaaaagtaacacctgaagaaatggatggtattccacatcatttaattgatatcttgaatcctgatgatacattttcagcatatgaattcaagcgattagcagaagatttaattactgatataacgaatagaggtaaagttccaatcatagcaggtggaacaggcttatatattcaatcattaatatataattatgaattagaagatgaaacagttacacctgcacaattatccatagttaaacaaaagttatctgcattagaacatttagataatcagcaactacacgattatttagctcaatttgatgcggtttctgcagaaaatattcaccctaacaaccgccaaagagtgttgcgcgctattgaatattatttaaaaacaaaaaaacttttgagtaatcgcaagaaagtgcaacaatttactgaaaattatgatacattattattagggattgaaatgtcgcgtaaaacattatattcaagaataaataaacgtgttgatattatgttggatcacggattatttagagaagtgcaacaacttgttgaacaaggctatgaatcttgccaaagtatgcaagctattggatataaagaattaatacctgtgattaacggacaaatgatttatgaagatgctgtcaatgatttaaagcaacattcacgccaatatgcaaaacgacaaatgacatggttcaagaataaaatgagtgttcattggttagataaagaaaatatgtcacttcaaatgatgttagatgagattacaacccagattaagtaaaaggagtccgacagatgattgcaaacgaaaacatccaagacaaagcactagagaattttaaagcaaaccaaactgaagtaactgtattctttctaaacggtttccaaatgaaaggtgttattgaagaatacgacaagtatgtcgtaagcttaaattctcaaggcaaacaacacttgatttacaaacatgcgatcagcacttatacagtagaaactgaaggtcaagcatctactgaaagtgaagaataagttgtaatcatatgggcacgatttaatgactcgtgtacataacgtttgaagtatgataaatagatatagaaataaagtcatatgtgacatcaattaaatgatgttcaaatgacaagatacaatagaggaatgtttgtaataaaaacgcttcatataaaggtcgagtcaatatatgatacgactttatatgaagcgttttatttgctatgagctagtatattttataataatttttctatttctctttcgatttgaacaggttttttttgaggtgcaaatcgtttaacaacgttaccttcgcgatccactaaaaacttagtgaaattccatttgattttctcattaaagaatccgtgttgtgccgcagtcaaatatctaaataaaggtaattgatgttccccttttacgtctattttttgatgcatagggaaggtaacaccatagtttaatttacagttttgagctgcttcttcgcctgaaccaggttcttggccaccaaattgattacaagggaaacctagaattacaaacccttgatctttgtatttctcgtataatgattgcaaaccttcaaattgtgaagtaaagccacattcgctagctgtattaacaattagcataacgtcacccttatatgcatctaatttgtaagtaacacctttatttgtttctactacaaaatcataaattgtctccattgtatcatcctttcgatttacttaaaatgtaccacaaaatcgtgtaatagtctttactaaaactctatgatagaatactttgagtaggattttattaaggagatgtataacatggctcagcaacaaattcatgatactaaaaataaactagaaaaagctgtcttagtcggtgtacatgctcaagatgataagcaatttaattttgagtctacaatggaggaattatcatctttatcagagacttgccaacttgaagtgttgggtcaaattactcaaaacagagatcgtgtagatcgcaaatattatgttggtaaaggtaaaattgaagaaattcaagcatttattgagttcaaagatattgatgtagtcatcacaaatgatgaattaacgactgcacaatccaaatcactaaatgaagctttaggtgtaaaaattattgatagaactcagttgattcttgaaatatttgcattaagagcaagaagtaaagaaggtaaattgcaagtagagctagcacaacttgattatttattacctagattgcaaggccatggtaaaagcctttctcgtttaggtggcggtattggaactagaggccctggtgaaacgaagttagagatggatcgcagacatattcgaactcgtatgaatgaaattaaacatcaattgcggacggtagaagaacatcgcgaaagatatcgaaataaaagaaatcaaaatcaggtgtttcaagtagctttagttggttatacaaatgctggtaaatcatcatggtttaatgttttagcaaatgaagagacgtatgaaaaagatcaattatttgcaacgttagatcctaaaacacgacaaattcaaataaatgatggatttaatttaattatttcagatactgttggttttatacagaaactacctacgacgttaattgcagcttttaaatcaactttagaagaggctaaaggtgcagatttattagtacatgtcgtagatagtagccatcctgaataccgtacgcagtatgacacagttaatgatttaatcaaacaattagatatgagtcatatttctcaaatagttatttttaataaaaaggacttatgtgatcatgcatcaaatcgtccagcaagtgatttgcctaatgtttttgtttcttctaaaaatgatggtgataaattacttgttaagacgttatttattgatgaaatcaaaaggcaattaacttattatgatgagacaattgcgacgaataatgcagatcgattatattttctaaaacaacatacattagtgactgaacttaaatatgatgaaattgaaaatgtttatcgtataaaaggatttaaaaaataataaaaggacgaaattcaaatgaaagatataagtaagatagtagctgacgtcgaatcaacgttagcaccatattttaaagaaattgaagaaacagcatatattaatcaagaaaaagtattaaatgcatttcatcatgtcaaagcaaccgaaagtgatctacaaggatcaacaggatacgggtatgatgactttggacgtgatcatttagaagaaatatatgcgcaggcatttaaagcagaagatgcaattgttcgtccgcaaattatttcaggtacgcatgcgattactattgcattacaaagtttattaaaacatggtgatgaattaatttatataacgggtagtccatatgacactttacttgaagtcattggcgtaaacggaaatggtattgaaagtttaatggagcatggcgtatcgtataaagatattgcacttaaagaaggtaagatcgatattgaaagtgtgttagatggggtttctgagcgcaccaaagtaatagcgattcaacgttcgaaaggctatgatcaaagaccttcaattccgctagatgaaattgaaaaggtaattactaggttgaaaaacgtgcatcctaatattttaatatttgtggataactgttatggggaatttgttgaaagacgtgaacctatagaatgtggtgccgatttaatagcaggatcattaattaaaaaccctggcggtggtttagctaagattggtggatacattgctggtagaaaagatttaattgaacgatgtggttatagattgacagcacctggtattggtaaagaagcgggtgcatcattaaatgcattgcttgaaatgtatcaaggtttctttttagcaccacacgttgtcagtcagagtcttaaaggtgcattgtttactagtttatttttagaaaaaatgaatatgaacacaacgccgaagtactacgaaaaacgaactgatttaattcaaacagttaaatttgaaacgaaagaacaaatgatttcattttgtcaaagtattcaacacgcatccccaattaatgcacattttagtccagaacctagttatatgcctggttacgaagatgatgttattatggcagctggtacgtttattcaaggttcatcgattgaattatctgcagatggacctattcgtcctccttatgaagcatatgttcaaggaggattaacatatgaacacgttaaaattgctgtgacaagagctgttaatcagttgaaagaacaaggacttatataatagattaaatttcaccctaaatgataatgtgttttgggtgaaattttttgcggagatttatcagattatttttaaaaattgaaaaaatattttagctgtagattgttttatgtcgttttagaagtcgaaatcgcagttatatcaatgttttaagctttatgttagaaaacctgacatatttttgaaatcctaaaaaaattatgataagttattaacaagttcaaaagtagaggagaggaacaatgatatcgaatgatgcaatcagacgaaatatggctgtcttctctatgagtgtagtaagtaagttaacggatttaacgccaaggcaaatacgttactatgaaacacatgaactcatcaaacctgaaagaacagaaggtcaaaaacgtctgttctcactcaatgatttggaaagattactagaaattaaatcattattagaaaaaggatttaatatcaaagggattaaacaaatcatttatgactcacaagagcatttaacaacagatgaacaagagataagaaaaaagatgattgtagatgccacgcaaaagcctattggagaaactttgccaataaatcgtggtgatttatcccgatttattaaataaaatttggaggattttaaaatgccaaaacgtactttcactaaagacgacattcgtaaatttgcagaagaggaaaatgtaagatatttaagattacaattcactgatattttaggaacaattaaaaatgttgaagtgcctgtaagccaattagaaaaagtacttgataacgaaatgatgtttgacggttcttctatcgaaggtttcgtacgtatcgaagaatcagatatgtacttacatccagatttagatacttgggtaatcttcccatggactgctggacaaggtaaagttgcacgtttaatttgtgatgtatataaaacagatggaacaccatttgaaggggatcctcgtgcaaacttaaaacgtgtattaaaagaaatggaagatttaggcttcacagactttaacctaggacctgaaccagaattcttcttgtttaagttggatgaaaaaggggaaccaactttagaacttaatgatgatggtggatatttcgatttagcacctacagatttaggtgaaaactgtcgtcgtgatattgttttagaattagaggatatgggcttcgatattgaagctagtcaccatgaagttgcccctggtcaacatgaaattgactttaaatatgcagatgctgttacagcatgtgataatatccaaacatttaaattggttgttaaaacaatcgcacgtaaacataatttacacgcaacatttatgcctaaaccattattcggtgtgaatggtagcggtatgcactttaacgtttcattattcaaaggtaaagaaaatgcattctttgatccaaatactgaaatgggcttaacggaaactgcatatcaatttacagcaggtgtgcttaaaaatgcacgcggatttactgctgtatgtaacccgttagtaaactcatataaacgtttagtacctggttatgaagcaccatgttatattgcatggagtggtaaaaaccgttcaccattaatccgtgtaccatcttcaagaggattatctactcgtatcgaagtacgttcagtagatccagctgcaaacccatacatggcgttagctgcaatcttagaagctggactagatggtattaaaaataaattaaaagttccagaaccagttaaccaaaatatttacgaaatgaaccgtgaagaacgtgaagcagtaggcattcaagacttaccttcaacactttatactgcattaaaagcaatgcgtgaaaatgaagttattaaaaaagctttaggaaatcatatctataatcaatttattaattcaaaatcaattgaatgggattactacagaactcaagtctctgaatgggaaagagatcagtacatgaagcaatattaatacgctaaacaatgatgggaaatcagtaatatcaagggctagagcattttgctttagctcttttttgatttggaaagatgggatttcacttgaccacttttgttaaaaaatggatttggtcaagttttggtcaagtaaatgttttatgtatttatttttttaaagctggggaagaccattttatattttagttcacatgaattttaatatatttggaggtgatgagatgaggcgataaaagaacgtcgcgaaaacgttgagtattacttgaaaatagccatattcatattacttctcatcgaattcatttgcagaacgttctaaggtaagaccccgaaaagagggaccttactacgcattattaagggggtaatactatatgaaaagagaaacaaaacaaaaaatatctttttgtttatcgatcggtattttcattttagttatactactattgatattctaaaaaattaaaaatttcgcctcatctaatttatgaattgctatgatgaaatattcaatacaatcaaagaattgatagaaaacaaagagatatcgagttatcaaattaataaagatactgggataagttacggtaatattaatgctatgcgccgtagagaaagaagaatagaaaatttaagcttaaagaatgcaaagatcttatatgaatatgcgaaaaaggtattgtaatataagcattgagttcaataggcatacaataactgcccaaactagtgactgagtgggtgcttttatagtattaaaagttttctaaaagtgaaagaaatcatgtttagtgatttacttatgtttttcaaaatagtataataattttatataatatatagagcttcagtataccttttgagtatatatggagttctttctttttatacaagatgtatatgtataaatggaaatatttaatacattacataaaaacctttaggtgcacttagagggatgttaatcataaaaaaagagattttgaaaaatataggctattatactttagaattacaaattataaatcttgccagtggatatgggagttcaacatgtcacttaccccaatttgtggaatgttaaataactataaagaggaaaggagaaaaaatgataagaatggttaaagaaaaagaacgaatagcaaaattaaatttcgaatagctgtgacgagcttaataattcaagtacttaattttatcaaatcgttcttttaaaaaggtaaagggcaaaagacctttaccacattaaatagggaggtggtatttatgacaagagaattaaggaaaaaattaactctctatcttaacattgcaactttaatattatttattattaatttaactagaaaaaaataaattattctttcattttgacaaaaattatgaaccagtttaaagaaatttataatacaatagaaaaattactaaatgataaatcaatatctaattatagaattaatcaagacactgatgtttcttatggtggtataagtgaattaagaagcgggaaaagaaaagtgaataatttaactttagaaacagcggaaaaactctataattaccaaaaacaattagaaataatgattgaagattaaaataaggccatatttttgaaatatcatggagtgagccttttaagtcatctaattttaaagtatattaaatatggataacttaatgtgaatataaataaaaaattatcaaataatataatatagaatagatggagacaagaaattttatcaatatataaaaaaaacgccaatactattaggtattagtttatgaattaactagtttggcaactagaaaaaaacaatgtattgctaaacgtagttactgcattaggattattataattataaatagaaagagagtgtgattaataatgaatgagattgaaactattataagtgaaatagaaaagttattaactaacaatacaccatatagtatttcaaaaaactcaggtgtaccacgtcaaacagttactgatttaaaggtaggtaaaactaaaataaaagaagctaaatttaaaacgataatcaagttatatgaatatcaaagaacattagaaaataaaacagaatgttaacaaaaatattttgttaggttaggtggacaagaaattaaatttctaatgatttcatggttgtctgtccacgttttgtccacctcaataagataatctcttagttttagaaattgtacatggttaaataatcaaaaatgcatattatgaaattatcattgccattaaatcttgaatgatctttaagcgatgatataaaaggctgaacacagtaaataagttaactttaatgcagtattctatactatacatattttgtaataatgtttatgcacataatttttcattgacaattttttatattaaattgtgtaattggcatatatgatgatttgtgataattatattgtaatatagcatttggttttatgattctaaaattaatagatttgaaaagtatactttatttcatgaaagtttttggtacatttatttgaaaatgtttttattacaaagttacatggctaaatgtttcttaacaaaattaatttttcgagtgtaaagaatcgtgtggtaaacataatttatatagattataaggaggtgaaaatggtcgaggaagttaaaacgataaaatagtttgaatgttttgatttcaattctggtaggactattgaatttgcaatctaataagaatgtgaggtttgatttaatatgaagtcatattctttgaataaaatattactttctcaccattagtaaaatgaagatgactattaaagtgcgaaaaacaaataaaaaagagaaaatagaatttttaatagggacgtttataattattttagtaatattagggttcaaaattatgaaataaatgtatagtatttgagaagtctatatgactccggaaaaattaaattctaaagatatctcaatatctcaaatttaatagactactggagttagtagtttgaatattgaaagacactaatctaataaaaatacataaaaggttaaactttagaagtggctgtaaacttcaatgaatactaaacattgaagttttgtaaaaggcgtaaggtatacaagacaaatcgtttatctttgacaaagtaattgatgatgaaaagtcgttaatatgtagaaacaaaaattgaaaatataaaatttaactattatgaagtgatgatagccattaatgaatagaaaaataataaaatcatttatagataaaaaatacgttaagttcacagaatttcgaaaaaaagcagaaaacattgtacagatatggagatgaaaaaatgtcagaatacaagaaaaaaataattgaattaattgaaagtaatttaacaggatatgaaatttctaaaaaaactggagtttctcaatacgtactttcacaattaagacagggcaaacgcgaagtagataatctaaccctgaatacaacagaaaaattatatgaatatgccaataaagttttgtaatttaactaatgtataaattaatcaagctatgtttatttgatttaactattaataaaaatcatatggtgaatggatattataataattaaaatacaaaaatagtagattccaatttgtgaaaaaggagtatgtcgtttcatttagaatttattgcacgaaattagcatcgaataagggaaaataagtgttaagttttaaatgataaaaaagattggaatggatcgtcttgaaatgctcccttcaaagttttcattttttcaatgtcgacttcgaagggggcattttcattaaattgttatagctttttatatttgtataatgaacatataagtttaagaaggtgcgagtgaaggaaataaaaaagctcaaatgtaccaaattgttaatcttaataaatctctactttataaagattgaatggacattcgagcgttaatcagtcaggagggactttccctcctacaatttaataataatacttgcttcaccactatacaaggagtgagttgttatgttcaaagtgaattattcgattttaagttattatccagaatataatatcgcagtaagttggcaacgtttaagagaaggaaaaacaataaaaaacaagatttaatactgctgcgtcatgaggcgcttgaacattatttgatgaataagtataatttcaactatgattatgcacataaaattgtatcaaaaaaatacgattattcaatttttataaaaaagaaggtggattaaatgcttacattaataaaattgaaagaagatgaacaggttataatatatgaatatatacctgaagatgatataagtaacggtaaaggttcagtaacttttaataaaaaagatgcagaggttatagatttctcattatctgaaatagaaaatgaagaatattttatgttatatcgtaataagtctttttctgtagtaagagactttatcgagaagcaagaatttcccgaaaattataaaatagcatggtattaaagcatcctttctacacagataaagagaaagcgatgctatttttatatgcttttttcattattcgttgaaaaagaagagtcacaaaagttaacatatttaaaagaacttggtgaagatggcgaatataaatatgttgccaaaatagatagtaaaacatctaaattatgtcattcactcaacggaaaaatatttaaagttaaagatatgataccaggtgtgaatgcgccacctatgcatccttggtgtagaagtaccacagtgccacatgtcggcaattggcgagacaagttctttaaagagcgtgaaggtaaatatcaagtagaaggttgttttattgaatcaggtgcacttaataataaaagtgatgaatacggtatcaaaaggaacagacatgctcaaatttattataattcagttagaaatcgagataaacagatagagatttctaaaattgctaaaaatactaatataaataaaaatttaattcaaagagtttatgaacatatatttgaaaataagtatttattagaaagtggatttaaacaatttgatcctgacttttatatggctcaaagttggcaacgtttaagagaagggaaaaatattaaaaaaatggatataataatgtagaaacatgaagctcttgaacactatctaatgaataagtataatttacactatatagaggcacataaacttacagaaataaaatataattatagtattttaattaattagaggtggaaatgattgctaatattaaaaataaaagaaattaatgataaaagtgttacatataaatattttcctaataatgatgaaaatattaagcctggtattattcaaatggatatagatagtcttgaagttatcaatgctgaaaaatctagtttagaaaaaaatacaagagataattattttattcatgccatagacagaatatacataaatactagtaaagggctatttcctgaatctgaactcgtagcatggggataaagaaagtttactttaaaaattttaaccttcaaatgtgaaggttaaaatttttattgtccaaaacgtgctgatgacattttaaaagcaagtatggaatatcagtcgacagactataaacggaggtatatctcatggaaaacaatgatagcaatgaagtagcttatttgttaaaagatggtaaatttacaaaagtatatgtcaatcaagatagtgtatcttttgtgccagggtaacaagcaaccgaattattatttaacagtaaaccgaattcaattgttatgttacataaccatcctggacagtcaggattttcagaatatgatttatttacattttttaagcatccatcaataaaatcaatgacaatcgttactaataagggacaagtaaaatttattaccaagtcaaataggtttcatggtaaaatagtgagtaaattttgtgctaaatattttacgcatattaatatcattaatgatagccatattgaaaaattattgaaaaaactttatagtataaatatgattaaatataaagtgagatgattttaattatgttagattcacaattagatggaaatgtaactgcaaaagaattgagtgaatcttttaaagaattagttgaagaatttgaaagtatagaaaaagcgaaaaagaattcaaattcaaaagataaatagcatcctttttagacagataaagagaaagtggtgctatttttatacgcttttttaactatttactgaaaatgcagaagcacaaaagttaacatatttaaaagaacttggtgaagatggcgaatataaatatgttgccaaaatagatagtaaaacatctaaattatgtcattcacttaacggaaaaatatttaaagttaaagatatgataccaggtgtgaatgcgccacctatgcatccttggtgtagaagtaccacagtgccacatgttggcaattggcgggacaagttctttaaagagcgtgaaggtaaatatcaagtagaagtaaaagaagcataattacaggaaaaagctaaaaaccagatgaaagaaatgattaaaaatggtaaaataaaaatagaaataaattgcggaaaataaaatagatatatgttaggtcatcacctatataatgaaaataaaaaaagagccattttaaataataagaaattgcctagctatacaatactttctatagatttattgaatgaattgttaagagaaaaaatgtcaacaggcaatctaatattaagtgatgagcgatttgatttgaaagagattattaattttaatcaaattattggaaaaatacatatcgaaaatgtgtatattgaaaccagaaagggaaaagtgcattattcgaagacaggtgctcatatagtaccttatattgataagtaggtgaaaagtattgagaattgaagatgcatatcgtaaagatgttattatcacgcttttgaataatgaagaatacgaagggtttgtaactgactatgaaaatgaattcgagagcgaaacaggaaatcttgttgtagatatacagactgattttgctgtttattcgtttgatgaaactgagataaaaagtattagattattaaaataattacaaaatagcatcctttctacaaaaagctaaaaaagaaatgcttgaaatgataagtaatggtaaaatgacgatgaaattgaataatgttaagcaaaagcgtcatattttatgcacaaatgaatataataataagaaaaataattcatctttattaccaagttatactataatagattctaatgaaagtgaaaagatgactaaaaaagaatttattgatattccagttttgtttgatgatgaagggaattttagaataaaacaagttatagattataaaaagataataggtaaatcttatgtgaatggtaaatatattgaaacgaaattaggtaaggttcattattctaaaactggttttcatgtagttccgtatattaaaaaggagtgattaaatatgaatttacagtcatacataggcaaattagtcaaattaacgcttactaataataaaatattaattggaaaagtgatagactttgatgataaagttgataattttgatggttataattcgatagaaattgatacaggtagaattacatatgatatatcagaaaataaaattaaaactattgttttacaataatagcatcctttctacacagataaagagaaagcggtgctattttttgcgcttttataacaactaaggatacaagacacataacttcaacaatatcctcatctaaacctatcgatttcctaagctcaattttaaacacaaagtttatttgaaatgatgcacacctataaaaatcttaatcatcgaaaagtcacaaacatctccatattaaaaacttaaatagtgcattccatttaaactaaacatcgatattcctaccaatatagacttagtaattcgattgttaatacattactttcataaaataactacaaccatcataatacttctcaaatgtcgtcaaattaaagtaaatacagcacaaattaacatttttaaatatataaaataaaacaagatactcaataatctgtagtaccttgttttggaataatgtaattttatatcatcaacggctacaaatgagcagtttcatatataaataaacacatctactcaactgatcttaattaattaataaatgatttaccagatgacatataacagcattattagattaattctaatagtttatttaaattttcttcggttgtcgcccaactggttgcgaatctaacaacacgatgttgatcatcgtatttttcccaaacagcaaatttaactttttgttctaactctgctattttctcgttacttaaaataaaaaattgttgattggttggagaatcaaagtaaagacgatagcctttatttttaaacccgtctttcatcttatttgccatttcgatagcatgtctgcttatattaaaatataaattgtccgtaaataattctaaaaattgtatgcctgttaaccgtccttttgctaaaagggcaccgtgatgcttgattcgagtggtaaattgtttcggttcattatttttcgtaaaaacaatggcttccccgcataatgcacctatcttcgtaccacctatataaaatacatcacaatatttagcgatgtctttaatagtcatatctgattggtcactcatcaatccataccctaatcgtgcaccatccataaataatggaagctgatattgcttacatactttgcataactcttccaattctgatttagagtataatgtgccatattctgtaggatgagaaatatataccattcctgggaataccatatggtcctttttaaaatcacttttaaatgtctccatgtaagtttcaacatctgaagcactaacttttccttccttagagggtatagtaattactttatgtccactatattcaattgcaccgccctcatgcacagcaacatgaccagtgtctgctgaaatgaccccttcgtaactttctaacattgaattaataacaacctgattggtttgtgttccacctactaaaaaacgaattgtagcatttggacagtcaattgtatctttaatcttttcaattgcctgagctgtgaattgatcaaagccatatcccgaagcttgtacaagatttgtatctactaatcgttttaatactttttcatgagcaccttctaaataatcattttcgaatgaaatcactacatttccccctaaaactaatatcaacattttaataagataaaccaatttcaaaactagttcgatatttaaaatgtattatgaatggttaaagtttgtatcgcattatcgcgaagttgaataaatatattatacatcaaacaatacattatgaaaattaattaattttttatcacagcgacttttcatgctggaacacatgtattaatgattgaattttactgttaaaagttctatgatttaggaaatagagaaaagaggggatttaaatggaacaaattaaacttaaaacttttacagctgagactttagagttattagaaaaaaacattaatgcttttttaagttctgaagaagctacaaatttaaaattagtaaatattactattaaagaaatagaagaaagaacattcccaaataatgaagaagaattcaatgcaattttaactttatctgtgaataaataatatgacgtgaaaggtgcaaaatgtttttttgtgcctttctttataggagaaaagactatgcgatttacattttcaaacgatttaggaacgttatttactattattttagccattggattcatcattaatttagtattggcttttattattatctttttagaaagaaataggcgtacagcgagttcaacttgggcatggctatttgtactttttgtcttaccattgattggttttattctttacttgttttttggtagaaccgtttcggcacgcaaattgaataaaaacaatggtaacgtgttaacggatttcgatggacttttaaaacaacaaatagaaagctttgataaaggtaattatggtactgataacaaacaagttcaaaaacatcatgatttagtacgtatgcttttgatggatcaagatggttttttaactgaaaataataaagttgatcatttcattgatggaaatgatttatatgatcaagttttaaaagatattaaaaatgcaaaagaatatatccatttagagtactatactttcgctttagatggtttaggtaaaagaattttacatgctttagaagaaaaattgaaacaaggtctagaagtaaaaatattatatgatgatgttggatctaaaaatgttaagatggcaaattttgatcattttaaatcgttaggtggagaagttgaagcattttttgcttcaaaattaccgttattgaatttcagaatgaataatagaaatcatagaaaaatcatcgtaatcgatggtcaactaggttatgtcggaggatttaacattggtgatgaatatctaggattaggaaaattaggatattggagagatacgcatttacgtatacaaggggatgcggttgatgcactgcagttgcgatttattttagactggaattcgcaagcgcaccgtccacaatttgaatatgatgttaagtatttccctaaaaagaacggaccattgggcaattcaccaattcaaatagctgcaagtggcccggctagtgactggcatcaaattgaatacggttatacaaaaatgattatgagtgcaaagaaatctgtatatttacaatcaccatatttcattccggataattcatatataaatgccattaaaattgctgctaaatcaggtgtagatgtacatttaatgattccatgtaagccagatcatccattagtatattgggcgacattttcaaatgcctctgacttattatcaagtggtgttaaaatttatacgtatgaaaatggatttatacattctaaaatgtgcttaattgatgatgaaatcgtatcagtgggcacagcaaatatggactttagaagttttgaattaaattttgaagtaaatgcctttgtatatgatgaaaatcttgctaaagatttaagggtggcttatgaacatgatattacaaaatcaaaacaactaaccaaagaatcatatgccaatagaccgctgtctgttaaattcaaagaatcgttagcaaaattagtttcgccaattttataatttatttgtaaggagtctcgattatagaggctctttttattttgcccaaaattaaaataacgataaatatattatgtaaatctaataatgacatttgtcatttcaaatctatgacaaagtgttctattttaaatctaataaatttactaatattaaattaagaaaaaaatagaggtgattaaattgattcaaatatctaatatcaacaagtcatttaataaaagatgtgttctaaaaaatatttcgttcgatattgaacaaggtaaatgtatcgctttaattggaaaaaatggtgctggaaagtcaacgttaattgatatattaattggtaatgttaatgctaattctggtgagatatttgataaagacaagttattacaaagtgaaaatcgcagtataatgttccaaaaaacgatgtttccagatcaattaaaagttattgagattatcaacttatatcaatcattttacgaaaatccattaccattggaagaaataatagaactgacgaaatttgattctagtcaactgaaccaatttgtaaataaactttctggtggtcaacaacgattactcgattttgtattatctttaatcggacaaccacaattgatcttattagatgaaccaacatcgactatggatatagaaattagagaatatttttggtcaattattgaaaatttaaaagaagataatcgaacgatactctatacatcgcactatattgaagaagtcgaacgtatgtcagacaaaattattctcattgaaaatggagaaataatacttaatgattcaacgtcacatattagaaccaatcagcaatctcagattacgttatccgatgaatatataagaaagttaaaactagataaagatgatttagttattcaaaaaaatcataatggcactatcaaaattattacttcaaatgtaaatgatacgattttatatcttcaacaacttcatattaatttggatgatattgaaatacaaaaagtctcaattgttgattcatacttcaacaataaaaagcaaaggggatctaattatgatactaagttacttgaaaatcgaatttaaagttataatgcgtaaaaaaacaacattaatattatctattttatttcctgttatattctatatattatttacttcgatattggaattgccggaagatgttaaacctaaattttataaagagtatatgtatagtatgacggtttatagtttgttaagttttagtttactaacttttccattagatattattaatgaaaaacaaaatgaatggcgccaaagattaatggtaacaccatttacttttactagttattatatttcaaaagtagtgaaaactatgctgcaatttgcaatagcgatattagttatttttatggttggacatttttataaaggtgttgcaatgagtgcagttcaatggttagagtcaggaatatttttatggttaggtgcgtctctattaataacttttggcatattattttctttgttaaatgatattcaaaaaacaagtgctttagctaatatcgtaacaattggtttagcagtattaggtggattgtggtttccgataaacacatttccaaattggcttcaacatgttgctcatgttttaccgagctatcatttgcgtaaactaggtgtagatattgcttcaaatcatcatatcaatttaatatcatttgctataatactcttgtatgctttagggagtataatagcagtatattgtattagtcattttaaaagggcggaataaaatatgaaatttttaaaagatacttcaattgctgaaatatcgtctatactttatctgatttttcctattgccggtatattttttaatgaagtatatggtcccaaatggttgtatattatatcagtcattgtcttttcgttgtcgtatcttatattagttatagtaaataatagacttaatacattaatgttttacattttgttgattattcattattttattatttgttattttgttttcagtgtacatccaatgctaagtttgtttttcttttatagtgcttttgccgttccatttacttttaaaaataatgttaaaaaaacggcaactaatcttttcatactaacaatgattatatgtacaataataacgtacttattgtataacaactattttgttgcaatgatggtttattatgtcgttatatcgttaataatgctagataattttaaaaaaatgaaaaaccgtgaatatcaaaaagaaatagcagaaaaaaatagacatattaatacattaattgctgaacaagagcgacatagaattggtcaagacttacatgatacgttagggcatgtgtttgcaagtttatcattaaaatcagaattagcttataaactaatagatgctgatgtagaaaaagtaaaagctgaattattagcaattaataaattatctcgtgaatcattgaacaaagttcgagaaattattgatgatgtaaaattaccatcatttattgaagagattgatagtatacgtaaagttttaaaagatgctgatattgattttacatttgaaaataaagaattagcgcaagtattaagtcctactaaacaatctatgttagttatgattacgcgtgaagcgataaataatgttattaaacatgcaaatgcttcaaaagttcatggtaaattaaaaactgtaaacaatcataaattactgcttatgattgaagatgatggcaaaggtatcgatagtgattgtgaggtgaaaagtatttcacagcgtgtacaacatttaaatggaactttagcagtcgactcaacaaatggaactaaaataatcattgaaatctcaacaggaggaatagcatgacatctttaattattgcagaagatcaaaatatgttacgacaggcaatggttcaattaattaaactacatggtgattttgaaattttagcagatactgataatggtctcgatgcaatgaaacttattgaagaatataatcctaacgttgttattttagatatagaaatgccaggcatgactggacttgaagttttagcggaaattagaaaaaagcatttgaatattaaagtgattattgtaacaacttttaaaagaccgggatactttgaaaaagcagttgtgaatgatgtggatgcatatgttttaaaagaacgttctatagaagaattggtggaaaccattaataaagtaaataacggagagaaagaatatagcgccacattgatgacttcattttttgtagataaaaacccattaacgcccaaagaacaaattgtattaagggaaattggcaatggtttaagtagtaaagaaataagtgaaaaattatttttgacagatggaacagttagaaattatacatctgttataattgataaattatttgcagataatcgttttgatgcttggaaaaaggcaaatgaaaaaggctggatctaaatacaaacaaaaaagtattgagtgttttgatttaagagacttggaaagtgagtcaataatcaaaatcttactcaatacttttattttggtactcgcaatttagatttgttaactaattttttcgcttattataaaacgaaacaatcaagtaaacgataaagcctacaaagatacccaataaaatagatagtactgccgtcactattaatggtaatttgaaaaatatttgtaggaaaataccaatgataattgcgataattactgcaattaatgtgactgtattttcatttgaaatgttcatttattttcactccttaacaataacattatatcatgctatagctttccaaaatattgaaatatgtagatatggctattgacgatatttcttaacttttatatgattaatcggaatgaaaaaagagaagtaggtggcaatatgaagtcaaataaatcgcttgctatgattgtggtagccatcattattgtaggtgtattagcatttcaatttatgaatcatacgggtcctttcaaaaaggggacgaatcatgaaactgtacaagatttaaatggtaaagataaagtacatgttcaaagagttgtggatggtgatacatttattgcaaatcaaaatggtaaagaaattaaagttaggcttataggggttgatacgccagaaacggtgaaaccgaatacgcctgtacaaccatttggcaaagaagcatcaaattatagtaagaagacattaacaaatcaagatgtttatttagaatatgataaagaaaaacaagatcgctatggtagaacattggcgtatgtatggataagtaaagatcgtatgtacaataaggaattagtggaaaagggacttgctagagagaagtatttttcaccaaatggcaaatatagaaatgtatttatagaagcacaaaataaagctaaacaacagaaattaaatatttggagtaaataattaaataggtgattatatatattaaagtaaaatatacttgaagcatcgatttattattaccataaatttatatatagaaataatttaaaggcataataaccatagtgcgtatcgagcgtaatggattattatgcctttgattttacttgaatatagctgtgatttgatcaacctgttctttatttaaagggtgtttagatagctctatggcttcgctaataatacgtcgtaacgaagattttgttgaaactgtatcaacatatttatctctttcttcagaaccttgaatgatattaactgtaccatcactaaagtaaataacaccggtactttggactttaaagttaaagttttgttcaatatgatcctttaatgctttcgcattatttgctgctaattgatacggatcataatcataaaaatcataaataacacgatttggttgaactgtttctgtaaaagtatagatagactttcttgatgaattaaactgatcatgatattgctggctaatgtaatgaccgacaactttttcaatattactattgcttatttctgtatcatgctcatcaggtacatcaaagtgataaaatgttttttcaccccagctttttacatcaacgtttattaaaccgatatctgaaacaatgataaaatcaaatgaacgtgcatactcgaaaaacggatgtttagtagctaaattgcttgtaacgataatatcgtaatattttaatttaccattttcgagatagctatctaaaatcttgcgtaattctcttttagcatttttgtatgcatggtggccaacatcattattagaactcagcatttgacttcttaattcagcattttctgcacttaatgctttgttctttttaataagttgctttcttgcataaacttcggtatctattttactattactatacctttgatttaaaactaatataccaattaatgctacaatgataatgataagtacaacataaaaagacattttttcaccaatcctttttgacttctttaactttgtatacaataataattaataaagattaattgttattcaatttcccacatttttattagttgattttagttcatcattgttataatcaaattataaactgacagatattgatgttcaatgaatatgacgtgaaagattcgtgaattcaagtttatgtcgaatttatgttataacggtcatttaaatgacagaattaggtcactcatagtattttgaagattgaattcattaattttaaaatgtataatgatatttgtgaaagcgcttgcttaggaggtgtatttgagagtgaatgaaatgaatgctaaagaacaattagtggacaatttaatgaaaacatcatcgcaattatttaaatttcacggtgaagttgccatgcagcttttcttaaatgatgaattaaaattaccttctattgttgaaatatgcgtggaacgtaagcgtttaagtgatattgtgaaagttattccgcaatcatatgcgttactatacatagataagcaagatcaagcaatagctaaagaagatttatcactttcaaaaattgcaaaagtttatgtgcaatatgatgatacaacaataatgagtattttcgtttatgatgtagtaaacgatgaatggatttttagattggatccgaatatacgtatacctaagagtaacatatacttccatagtttaaattgggatgtggattatattaaaccggagatcgttctaatgtatgatctaatgcaacaccatcagtatcatcattattccaattataaacgagtcatagatgcattaagctactatcaattttttattttaaaatttgtagtaggtgagcaacgtattaaggatgcaatccagagaacaataaataattaagaaaaagcaattcataacgcagttgaatacatgtgttacgaattgcttttatattagtttttatcacacaagttttttaatgcaaccccgtgatagcaaaactcatatgtagataatacagctttttcagcatcatctacatgaattccaaacatcatcgagatttccgaagcaccttggttaatcatttttaagttaatttttgattcagctaaggcatgtgtaattttatttgcagtaccgatgactttattcataccttcgccgacaatcattaatattgctaaatcatgctcaatacttagctcatcaacatcacatttttgacgaatttcatttaatacttttgtttctttattttgaatttgttttgaacgcataacgatactgatagtatcaatacctgaaggcatatgatcaaatgaaatattattatcctctaagacacctaatatctttctagtaaagccgacttgtctattcattaaatactttttgatattaataacggtaaaatctttatcacaacttataccgctaatcacatttttcgcatttatttctctatcatgcactataaatgtacccttatcttgagggcggttcgtatttttaatcaccacagggatgcgatctttataaagtggttgtaaggcttcatcatggaaaacactaaaaccagcataagataattcacgcatttctcgataagtgatttcttcgattaattcaggatctttgatgatatttggattagctttataaataccagacacatcggtgaaattttcataaattgtggctctaacaccacttgatatgatggcgccagttatatctgatccgccacgtggaaatgtaactatatatccttcatgagatacgccaaaaaatcctgggataattagtttttcatcataatctcttaattttttaatttcagagtaagcactatctaatatttgtgcttcttgtgggacgtcagtaacaaaaatacccgcttccttcggtgatatatattttgttggtataccttgactattattatataaagctatcaattgcgcattaaaatcttcaccacaagaaagtaatgcatctaatagtctctttggttcattttttaattgatttatataatgttccaaagtcacatctatcgtccgtaaaatactttcatccatttgcaattcttttacaatatcatcataacgctgaataatttctctttttttatcatgataatcaagatgattaatgaccttttcatataatctgattaacaaatcagttgttttaatatcattatcatgtcttttacctggagcagaaacgataacaatctttcgctctggatcagaattaacaatatttaaaacctttttaatttgagtagcattggagacggagctaccaccgaatttggaaactttcatagtgcatgccaacctttctaaaaaatcagaaaattgtattcagttttgtaagtaagaatgatattatgtatttatattttgaatattacgaactttacaaaaataaagaataattctatactatactatcatctagtgtttttcaataatacatttgtttttctcaaaagcacaaacggaggtacataaaatgaaaaaattaaatatagcattattaggattaggtactgtcggatctggtgttgttaaaatcatcgaagagaaccgacagcaaattcaagatacattaaataaagatattgtcataaagcatattcttgttcgagataaatctaaaaagagaccgctaaatattagccaatatcatttaactgaagatgttaatgaaattttaaatgatgattcattagatattatcgttgaagtcatgggaggaattgaaccaactgtagattggttaagaacagcacttaaaaataaaaaacatgttattaccgcaaataaagatttattagcagtacatcttaaacttttagaagatttagcagaagaaaatggtgtagctttaaagtttgaagcgagtgtagcaggtggtattccgatcgtaaatgccataaataatggtttgaatgcgaataatatttcaaaatttatgggaattttaaatggtacctctaattttattttatctaaaatgactaaagagcaaacgacatttgaggaagcacttgatgaagcgaaaagacttggttttgctgaagcggatccaactgatgatgtagaaggggtagatgcagcgcgtaaagttgtcattacatcatatttatcatttaaccaagtcattaaattaaacgacgttaaacgaagaggaattagtggcgtaactttaactgatattaatgtagccgatcaactggggtataaaattaaattgattggtaagggaatatatgaaaatggcaaagttaatgcatcggtagaaccaacgttaattgataaaaagcatcaattagcagctgtagaggatgaatataacgcgatttatgttattggtgatgccgttggtgacacgatgttttatggaaaaggagcaggcagtttagcaacaggtagtgccgttgtcagtgatttattgaatgtagcattattctttgaatcagatttacacacattgccaccacattttgaattaaagacagataaaacacgggaaatgatggattcagatgcagaaattaatattaaagaaaaatccaatttctttgtagtagtgaatcatgtcaaaggttcaattgaaaattttgaaaatgagttaaaggcaatattaccatttcaccgatcattaagagttgcaaattacgataatcaatcatatgccgctgttatagttggattggaatcatcaccggaagaattaatcactaagcatggatacgaagttgacaaagtatacccagtagaaggagtttaattataatgagaagatggcaaggattagtagaagagtttaaagcacatttaccagtaaatgaaaatacaccaaaattaacattgaacgagggaaatacaccactcattcattgtgaaaatatgtctaaaatactaggcatagatttatatgtgaagtatgaaggtgccaatccgacaggttcatttaaagatcgcggtatggtaatggctgtgacaaaagcaaaagagcaaggtaagaaaattgtaatatgcgcttcgactggaaatacatcagcgtctgcagcagcatatgcagcgagagcaggtttaaaagctatcgtcgtaataccagaaggtaaaattgcattaggtaaattgtcgcaagcagtaatgtatggtgcagaaatcgtttctattgaaggaaactttgatgaagctttagaaattgtaaaagaaattgcaaaaagtggcgaaatcgagcttgtaaactctgtcaatccatttagaatcgaaggacaaaagacaggctcatttgaaattgtacaacaattagacggtgaagcacctgatattttagcgattcctgtaggtaatgcaggtaatattactgcatattggaaaggctttaaagaatatcatgaagctaaaggatcacaattgccgaaaatgtttggcttccaagctgaaggcgcatcaccaattgttcaaaataaagtcattaaaaatcctgaaacgattgcaactgctattcgaattggtaatcctgctagttgggataaggcgactaatgctcttaaagaatcaaatggattaatagatagtgttactgatgatgaaattctagaagcatatcagttaatgacaactaaagaaggtgtctttagtgaaccagcgagtaatgcttctattgcaggtttaattaaattgcatagacaaggtaaattacctcaaggtaaaaaagtagttgctattttaactggtaatggattaaaagatcctgatactgctatttcactactagataatccgataaagccattgccaaatgataaagatagcattatcgattatattaaaggagctttataacatgtcgaatgttttggagttaacaattcctgcatcaacagccaaccttggagttggctttgattctataggtatggctttagataaatttttgcatctgtctgtaaaggaaacatcagggacaaaatgggaatatattttccatgatgatgcatctaagcaattgcctactgacgaaacaaactttatttatcatgtagcacaacaagttgcttctaaatatagtgttgacttgcctaatttatgtatcgaaatgagaagtgatattccattggcaagagggttaggttcgtcagcttctgctttagtaggagctatatatatcgcaaattattttggtgatatccaactgtctaaacatgaggtattacaattagcgactgaaatcgaaggacatcctgataatgttgcgccgaccatttatggtggtttaatcgctggatattataatgatgtctcgaaagaaacgtcagttgcacatatcgacataccagacgtggatgtgattgtaacgataccaacttatgaactaaaaacagaagcatcaagacgtgctttaccacaaaaattaacacatagtgaagcggttaaaagtagtgcaattagtaatacaatgatttgtgcattagcacagcacaattatgaattagcaggtaaactcatgcaacaagatggctttcatgaaccgtatcgtcagcatttaattgctgaatttgatgaagtgaaaacaattgctagtcaacataatgcctatgcaactgtaattagtggtgctggaccaactattttaatatttagtcgtaaagaaaatagtggggaattggttcgctctttaaatagtcaggtagtatcatgccattctgaattggtcgatattaatatcagtggtgttaaagaacgaattgtataccaatagacgctttatattgtaaaatagtattaaatgcagaatagagaggagatttaatgcgatatgacaaattataaagttgtcgttttagatatggatgacacattgctaaattcagataatgtgatatcagaagaaactgcaaattatttaacagcaattcaagatgaaggttattatgttgttctagcatctggtagacctactgaaggtatgattccaactgctagagatttaaaattacctgaacatcatagctatattattagttataacggtagtaaaacgattaacatgactaatgaagaagtagaagtaagtaaatcgattggtaagcaagatttcgatgaaattgtagattattgtcgagatagaggctttttcgttcttacatatcatgatggtcaaattatttacgacagcgaacatgagtatatgaatattgaagcagaattaacaggtttaccgatgaaacgtgttgatgatatcaaagcgtatattcaaggcgatgtacccaaggtcatgggtgtagattatgtagcgaatattacagaagctagaattgatttgaatggtgtgttcaatgataatgtagatgctacgacaagtaagccattcttcttagaatttatggccaaagacgtttcaaaaggtaatgcaattaaagcgttatgtcacaaattgggatattcggtggatcaagtcattgcttttggtgatagtatgaatgataaatcaatgtttgaagtcgcaggtctagctattgctatggggaatgcatcagatgaacttaagcaatatgcaaatgaagttacgttggatcataatgaaaatggtattccacatgcgctcaaaaaattgttataaattttaaaataagccttaacacatgatatttgaataagatatcttgtggttaaggctttttatttttgtgaaaatgacttcagttatactatggaggatttgaaatacatattttagattagtaatgatatcaaacgaatagagtaaatgtatattttttgaataaatcaagtattaactagtcacggaaggtagataaataaatttgatcattctgaataataacgaatgcattaaaaaatgcagtgacaatctaacattaattgttaaaatcactgcaagcatcttgattttatttagctgtttgtgtccagtcatgcttacctctgaaacgttttacatgagcatatatttggtcagcagtataatctaaatttgtataaactgtaatactgaacgctgattggttttcagcaaatgattcttcggaaaataattcctttaagtgcataaataaatcattcatttgtttatggtttaaaccgggatattcccttaaagttctctttaataattgtccgttcttttcttctaatgcttgaactacaataacaaatctttcatcttgctttagtacatcatcaaataaatttgtttgtccaatcattgaatttcacccctgaaaagttattgttatctatattatacacgatatgcaaaatatctaaaataaagaatggtaacatggtaataataaaatataaacagaatactagttaatacactttatactagaaaaagatattaaagtatatctgctttacaccattaaaaagcggcaaatgctatagataatctaaagcatctgccgtatgagaatttatttatttttgattgtcataatcgtgtggttttaaattaattgtttctagctttacaaattttgttttgtgaatgattttatgaataaagtaaatcaacgctagaatgattaaaggtaaaaagtttttaaaagcatttaaccattgatcttttaaaatatattcaactgagccaccaaatagcaagaataatagtgtagtgatgacaatgattggtcctaatggataaaaaggtgctttatatggtaggaccttattagggtcttgaccttgttttttaatagcttgtcgcaatcgtatttgtgaccaaatgcttgatccccaaacaactataatcattgaaccaataatttcaagtaaattaaaaacggcatttgaattaaagtttgcataaataataacaataacaacgactgcataagtagttaataatgctcttaaaggtaacttagttgtcttgtttaatttacttaaaaattggggtgcttttttgtctgaacttaaggaatacaacattctgcctgttgtataaacacctgaatttgcagcggataataatgaagttaaaataaccgcgttgattactgatgctgcaaaggctatgcctactctatcgaatacaattgtaaatgggctttgacttattgaactacttgctcttaataatgatggatctgtgtacggaataattgcaccaattactgcaattgataagacatagaataaaagaatacgccaaaatacttgtttaattgccttaggcatagactttttagggtcatctgattcaccagcagttactgctactacttctgtaccaccaaccgaaaatccggcgactaataatacgcctaagaaaccagagataccaccaacaaacggtgcttggccttttgtatagttttcaaatccatatgtatgaccacctaagataccgaaaatcattaaaaagccaaaaataacgaatacgataattgttaacactttaatcaatgataaccaaaactcagtttctccaaatgattttacagaaaaaatgtttaataatagtaaaattgtaataaagattaagctccaagtaatggggtggaaaaatttaaatgtgtcccagaaataaagcacatttgacgctactatgacatcaacacttgtaactaatgaccacaatgcccaatacaaccatcccatggtaaagccaagagatgagtcaataaagcgtgttgaataagagctgaatgaacctgatactggataaaatgttgccaactctccaattgatgacattaagaaatatagcatgacaccaataacaagataagcgagtatagcgcctccaggaccagcttgagaaatgatattaccagtagctacaaatagaccagtcccaattgcaccacctatagcaatcatggaaatgtgtcttgagttaagactacggttcattttattatcttccatatttagtctcccatctatttaaatatacccattattgtaagctttttaagtgtactattcaataactatttagtactgtaaagcgaaaaaattaaaattttctgattttttaatcatcttgagcatgtttaattgtaattttgatggggttaaattataatatgtattaaattataattattataaattgtggagggatgactatgtcacaacaagacaaaaagttaactggtgtttttgggcatccagtatcagaccgagaaaatagtatgacagcagggcctaggggacctcttttaatgcaagatatttactttttagagcaaatgtctcaatttgatagagaagtaataccagaacgtcgaatgcatgccaaaggttctggtgcatttgggacatttactgtaactaaagatataacaaaatatacgaatgctaaaatattctctgaaataggtaagcaaaccgaaatgtttgcccgtttctctactgtagcaggagaacgtggtgctgctgatgcggagcgtgacattcgaggatttgcgttaaagttctacactgaagaagggaactgggatttagtagggaataacacaccagtattcttctttagagatccaaagttatttgttagtttaaatcgtgcggtgaaacgagatcctagaacaaatatgagagatgcacaaaataactgggatttctggacgggtcttccagaagcattgcaccaagtaacgatcttaatgtcagatagagggattcctaaagatttacgtcatatgcatgggttcggttctcacacatactctatgtataatgattctggtgaacgtgtttgggttaaattccattttagaacgcaacaaggtattgaaaacttaactgatgaagaagctgctgaaattatagctacagatcgtgattcatctcaacgcgatttattcgaagccattgaaaaaggtgattatccaaaatggacaatgtatattcaagtaatgactgaggaacaagctaaaaaccataaagataatccatttgatttaacaaaagtatggtatcacgatgagtatcctctaattgaagttggagagtttgaattaaatagaaatccagataattactttatggatgttgaacaagctgcgtttgcaccaactaatattattccaggattagatttttctccagacaaaatgctgcaagggcgtttattctcatatggcgatgcgcaaagatatcgattaggagttaatcattggcagattcctgtaaaccaacctaaaggtgttggtattgaaaatatttgtccttttagtagagatggtcaaatgcgcgtagttgacaataaccaaggtggaggaacacattattatccaaataaccatggtaaatttgattctcaacctgaatataaaaagccaccattcccaactgatggatacggctatgaatataatcaacgtcaagatgatgataattattttgaacaaccaggtaaattgtttagattacaatcagaggacgctaaagaaagaatttttacaaatacagcaaatgcaatggaaggcgtaacggatgatgttaaacgacgtcatattcgtcattgttacaaagctgacccagaatatggtaaaggtgttgcaaaagcattaggtattgatataaattctattgatcttgaaactgaaaatgatgaaacatacgaaaactttgaaaaataaatttgatatgtagtttctatattgcgtagttgagcagtttatgatatcataataaatcgtaaagattcctaacaagagagggtgtttaacgtgcgcgtaaacgtaacattagcatgcacagaatgtggcgatcgtaactatatcactactaaaaataaacgtaataatcctgagcgtattgaaatgaaaaaatattgcccaagattaaacaaatatacgttacatcgtgaaactaagtaattcttatcattcaaatacgacgatttgaaaataaagcgggcttacctattatattggggagctcgcttttttatgaaatttttgtgaagagtgattaatggattgagtttcatcggtagaacaatatatgattatattagttgttactttattaaaatttgagaatatttatagaaggaaatagattactgattttataaagtcactttgttagcgaatgcttgaaagagtatttaatatagtagaatttaaaatttcaaagcggaatttaataagtacgaagtagttctgggtatgttttataaatgttcgataatacactttaatcttaaatatgatggtttagaaaatgatttaacaaagaaatgaaactttactgttgaattatgtgaggattgtgttattatataaatcgtaataattacgatttgataaaaagtgaggtaactatatatggctaagaaatctaaaatagcaaaagagagaaaaagagaagagttagtaaataaatattacgaattacgtaaagagttaaaagcaaaaggtgattacgaagcgttaagaaaattaccaagagattcatcacctacacgtttaactagaagatgtaaagtaactggaagacctagaggtgtattacgtaaatttgaaatgtctcgtattgcgtttagagaacatgcgcacaaaggacaaattccaggtgttaaaaaatcaagttggtaaaatcaaatttcgtactttagcccatttacaatatcaataaaacaatgtacagtatatacgaatgctataaactgaatgttttctcatattaataaggaaacattcggtttttaatttgcatttaaaaataattagtttttaaaggggctatttaaagtgaaaatatttgattacgaagatattcaattaatacctaataaatgcatagttgaaagtaggtctgaatgtgatacaactatccaatttggtccgaaaaaattcaagctacctgtagttcctgcaaatatgcaaacagttatgaatgagaaattagcgaaatggtttgctgaaaatgattacttttatatcatgcatcgttttgatgaagaagcaagaataccttttataaaacatatgcaaaattcaggcttatttgcatctatttcagttggtgtaaagaaagcggaatttgattttattgaaaagttagctcaagaaaaattaatccccgaatatattacaatagatattgcgcatggtcactcagattcagtgataaacatgattaaacatataaaaacccatatacctgatagttttgttattgctggtaatgttggtacgccagaaggtgttagagaattagaaaatgctggtgctgatgctaccaaagtcggtataggtcctggtagagtttgtattacaaagattaaaacaggttttggtactggtggttggcagttagcggcattaaacatatgtagtaaagcagctcgtaaacctttgattgccgatggtggtataagaacgcatggcgacattgctaaatcaattagatttggtgcatcaatggtcatgattggttcattatttgcggcacacgaagaatcacctggtgaaactgtagaacttgatggtaaacagtataaagaatattttggtagtgcatctgaatttcaaaaaggcgaacataaaaatgtagaaggtaaaaaaatgtttgtagaacataagggttcattaatggataccttaaaagaaatgcaacaagatttacaaagctcaatttcatatgccggtggaaaagacttgaaatcattacgtactgtagattatgttattgttagaaactctattttcaacggtgatagagattaatatttatagtaggtgatgtaaattaaaaaattcatagtaactgttgttgcgtttttatcaattattatcattgcgccaataacagaatttaaaccattcattcatttacaaaatgaagtaagacaatatattgacattcacatcaataaagaaacaatttctgcggaaaataaattggatacaccgaagaaacaacaatttgcctttaataatatacaaatgaacatgtcgaaatcagatgttgagaaaacattaaataaaccaaaaagagtgacatttaatgaatatggtacgaagtggtatacgtattatgatgacgattacaataattttataatgataagttacatgaaagataaagttaatgcgttatatacaaatcaaaatataatcacttcaaaatcaaaaattaaatacaatacacctaaatcggttgtaaggcaaagattaggcgaaccagaaacagagattgttaaaggtagagtgcgttacgaacaaaataataaagaatatgatgttttccataaaaatcacatttatacgacggtattttatgataagcatcgacgtaataatgtaacagctgttttacaagtaagtgatgctatggaaaatagattaaaagaacaatatggagcaccatcgaaatcgcttgcagatagttttgaactacaaaattttgatttagttaatgctgaaagaaaacaacatcaattatctacattgaagtattctaaacagaattctgaaactgcacgtaagcatagtaaagatatggccaacaatcattattttgatcatacaaatttaaaaggtcaatcaccatttgatcgattgaaaaaagatggtattacatttaactcagccggagagaatttagcatatggtcaagttagtagtatctatgcacatcaaggattaatgaattctattggtcacagaaaaaatattttaaatgatacgtttaaaatattaggtgttggtgttgattttaatgatgaaaaacaacctttttggacagaaaattatactggttaatgtttttggcatgagattaaagggtaatgtttgtctgtaaggaagtagataaacatgatgacaacagataaaccaaaagatgcggatatacttgaacgcgtcaaagatatacttaataaaaaagaaagaaaaaaataataatggctcgctcctgtaaattattacgggggcgagttttaatttgtgtaacattttgcagaaatctgtaattcaaaatttatattaaagaatgagattatctaacaattcgcaatttctgtttgaactgaatttagattagaataaataaaacctcttgaaaacgtaactttttcaagaggtccaaaatttataaaaatgagggcttaacaattacgataatatataacggtttaaaatattacatttcgcggtacaaaccaattactttcccaattacagcaacattgtctaggtaaattggctccattgtactattttcaggttgtaatcgataacgatttttttttttatagaagcgtttgacagttgcttcatcttcctcagtcatagcaacaataatgtctccattttctgctatggtttgactgcgaacaattactttgtctccgtctaatataccagcctcaatcatactgtcgcctacgacgtttaatatgaatatgtcgctattgtgtgtcgatgttaagtgttcaggtaatggaaaatattcttcaatattttctactgcggtaataggaacacctgctgtgactttaccaataactggcacatgaatcgtttcttccatattaatattatcatttgtttgatcacttacaatttctatagcacgtggtttcgttggatctcttcttatatagcctttttcttcaagacgtgaaaggtgaccatgaacagttgaactggatgctaagccaactgcttcaccaatttcgcgaacactaggcggataacctttcgtttgaacaacttgtttaatatagttatatatttcgctttgtcgttttgttaattctctcatatataggcactccctaaattaatttaaatacagtatatcattaatttgaaaccaaaacaaacatttgttcgttaaaatattgacacagaacataagttctgataaattactaatacaaacaaatgttctaggagtgaaaatgatgttttacaataaatataaaaacgtatcaacatatatcatcatatttttagtttcaagtgcagcctttgcaatattcttgttaagtgcgaacattagtgctcactcggaacaagtgtacgaaatgactgaccatcaaattaagaacaatacgataaataaagcatacgaacataaagaccctacaaacaatagcgaacaaagagatgggaaagtgttcgctttaataaattgatacattgtcacaacgttattttgcctatttttgcgaaatagcgttttttattacttttttgctgatcttaaatttgttatattttgttaaagtattataatgattgaataaacaaattgaaggtaggttttttaattgagtaattctgatttgaatatcgaaagaattaacgagttagctaaaaagaaaaaagaagtaggattaactcaagaagaagcaaaggagcaaacagccttaagaaaagcttatcttgagagttttagaaaagggtttaaacaacaaattgaaaatactaaagtaattgatccagaaggtaatgatgtaacacctgaaaaaattaaagagatacaacaaaaaagagataataaaaattaaatcacaaatctgtaaagaattttctgacattataacttgaaataagtattttacttatctttttattttaaaataagttataatgtatttgataaaattgaagaagggaagatacacaagatgtttaatgaaaaagatcaattagctgttgatacgctacgtgcactaagtatcgacacaatcgaaaaagcgaattctggtcatccaggattacctatgggagctgccccaatggcttacactttgtggacacgtcatctgaattttaatccacaatctaaagattacttcaatagagaccgtttcgtattatctgcagggcatggttcagcattattgtatagcttgttacatgtttctggtagtttagaattagaagaattaaagcaatttagacaatggggttctaaaacaccaggtcatcctgaatacagacatacagatggtgtagaagttactaccggaccacttggacaaggttttgctatgtcagtaggattagctttagcagaagatcacctagcagggaaatttaataaagaaggatataatgttgtagatcattacacatatgtattagcttctgacggtgatttaatggaaggtatatcgcatgaagcagcttcatttgctggacataataaattaagtaaattagttgttttatacgattcaaatgatatttcattagatggcgaattaaacaaagctttttctgaaaacacaaaagctcgttttgaagcatatggttggaattacttactagttaaagatggtaatgatttagaagaaattgataaagcgattactacagctaaatctcaagaaggaccaacgattattgaagttaaaacaacaatcggatttggttcaccgaataaagcaggaactaatggtgttcatggggcacctttaggtgaagttgaaagaaaattaacattcgaaaattacggtttagatcctgaaaaacgttttaatgtttcagaagaggtatacgaaattttccaaaatactatgttaaaacgtgctaatgaagatgaatctcaatggaattcattattagaaaaatatgcagaaacatatcctgaattagcagaagaatttaaattagcgattagtggtaaattgcctaaaaattataaggatgaattaccacgttttgaactgggtcataatggtgcatctcgtgctgattctggtactgttattcaagcaatcagtaaaactgtcccttcattctttggtggatcagcagaccttgctggttcaaacaaatccaatgtaaatgatgcaactgattatagttctgaaacacctgaaggtaaaaatgtgtggtttggtgtacgtgaatttgctatgggtgctgctgtaaatggtatggctgcacatggaggtttacatccatatggtgcaacattcttcgtatttagtgattatttaaaaccagcgttacgtttatcatcaattatgggattaaatgcaacgttcatcttcacacatgattcaattgcagtaggtgaagatggtcctactcatgaaccaattgagcaattagctggattaagagccattccaaatatgaatgttatccgtcctgctgatggtaatgaaacaagagtagcatgggaagttgccttagaatctgaatctacacctacttcattagtattgacacgtcaaaacttaccggtattagatgtaccagaagatgtagttgaagaaggcgttcgaaaaggtgcctatacagtttatggctctgaagagacaccagaattcctattattagcttcaggttcagaagttagtcttgcagttgaagctgctaaagatcttgaaaaacaaggtaaatcagtacgtgttgtttcaatgcctaactggaatgcatttgaacaacaatctgaagaatataaagaatcagttattccatcaagcgtaacaaaacgtgttgcgattgaaatggcttcaccgcttggatggcataaatatgtaggtactgcaggtaaagttattgctattgacggctttggcgcaagtgcacctggcgatttagtagttgaaaaatatggatttacaaaagaaaatatcttaaaccaagttatgagcttataagaataatttataaagcgagtatgtttagaagtctaggatgcataatcttagacttcttttaaagtgttgaaatttagagtatagcacttaaactacatcataagtgataagttatgaaagtatactatttcagattaatctttaaaagctctgttataacagcatgatttttgatattatttttagtatcgatattaaaatacttgaataaactagttcttgaaataatgtgatgaatttagtaaaattcagtaggataaagaaagcgggtgaaacaatggcaacttggttagcaattatttttatagtagctgcattaattttaggtttaattggaggtttccttttagctagaaaatatatgatggactacttgaagaaaaacccaccaatcaacgaagaaatgcttcgtatgatgatgatgcaaatgggtcaaaaaccttctcagaagaaaattaatcaaatgatgacgatgatgaataaaaatatggatcaaaatatgaagagtgcgaaaaagtaaattcgcaattgatagaggctattttccagatatggaaatggcctctttttataatcaaattaataagaataaatatgtttattaaaattaaagttaacaaaatgacgaatagactgagaaatgctataattcattttgtatgatttacagagagtttatttaacgagaaggtgtctgcgtgctctatttaatattttcaatcattgtagctttatttatgggaactatagttatagttattcgtatgaaagctcaaaattatccggtaaatgagaaaaaaatagttttgccaccgttttttatggcgaccggtgcattgatgtacgtcgttccatattttaggctaacaggatcggaaatgctagaagcctttataattggtttgcttttttctacagttctaatttggacttctcgatttgaagtcaaaggtacagaaatttatatgaaacgatctaaagcatttccagttattttgatttcattacttatcattcgtactgtgatgaaaatattcattagtaatgaaatagatcctggagaattaggcggcatgttctttttattagcattctgtatgattgttccttggagagcagcaatgctatataaatacaaaaaactaaagaaaacattaatcaattaattacttttaaaaccacttgtgatcgacttctaaatcagtcaatgagtggttttaattttacttgaaaaggtgaaatgattatattaaaataaaagcgaacaaatgttctatatggaggcagtaatgaaaattatacatacagcagactggcacttagggaaaatattaaatggcaaacagcttttagaagatcaagcgtatattttagatatgttcgtagaaaaaatgaaagaagaagaacctgatatcattgtgatagctggagatttatatgacacaacatatccaagtaaagatgcaatcatgttattagaacaagcgactggaaagttaaatttagaactgcgtataccaataattattattagtggaaatcacgatggtaaagagaggttaaactatggggcgagttggtttgaacataatcagttatttataagaacagattttacatcgattaattcaccaatagagataaatggggttaatttttatacactcccttatgctactgtgagcgaaatgaaacactactttgaagatgacaccattgaaacacatcaacagggaattacgcgctgtattgaaacaatagcaccggaaattgatgaagatgccgtcaatattttaattagtcatctgactgttcaaggtggaaagacatctgattctgaaagaccattaactattggaacggttgaatcagttcagaaaggtgtttttgatatatttgattatgtcatgctaggtcacttgcatcatccatttagtatagaagacgacaaaattaaatatagtggctccttattgcagtattcattttcggaagcgggtcaagctaaagggtatagacgtgtaacaattaatgatggcattattaacgatgtatttattcctcttaagccacttagacaattggaaattatctcaggcgaatataatgatgttattaatgaaaaagttcatgtgaaaaataaagataattatttacattttaaacttaaaaatatgtctcatattactgatccaatgatgagtttaaaacaaatttatcctaatactttagcgctgacgaatgaaacttttaattacaatgaagaaaataatgctatagaaataagtgaaaaagatgacatgtcaattatcgaaatgttttataaacatataactgataaagaattatcggatatccaatctaaaaagataaaaaatattttagaaaacgaattgagaaaggaggattaatgaatgaaaccattacatttaaagttgaataatttcggcccctttttaaaagaagaaattgatttttctaaaattgataataatgaattgtttttaataagtggtaagactggatcgggtaaaacaatgatttttgatgcaatgacttatgccttgtttggtaaagcatcaactgaacaaagagaagaaaatgatttgagaagtcatttcgctgatggtaaacagccgatgtcagtaacatttgaatttcaattaaatcatcgaatttataaagtgcatagacaaggcccttatatcaaagaaggtaatacaacaaaaacgaacgctaaatttgatgtatttgagatggtggatggcaagtatgaaattagagaaagtaaagtaatttcaggtacccaattcattattgaattattaggagtaaatgcagatcaattccgacaattgtttattttgcctcaaggtgaattcaaacgctttttaatatcaaacagtcgtgaaaagcaagggatattaagaacactgtttgacagtgaaaaatttgaagctatacgagaaatattaaaagaagaagtaaaaaaagaaaaagctcaaatcgagaatagatatcaacaaattgaccttttatggcaagaaattgaatcatttgatgatgacaatataaaaggcttattagaggttgccactcaacagatagacaaattgattgaaaatataccacttttacaagctaggtcgaaagaaatactagcatctgtaaatgaaagtaaagaaactgctattaaagaatttgaaataatagaaaagaaaacattagaaaataatatattaaaagataatattaatcaactcaacaaaaataaaattgatttcgttcaattgaacgaacaacaacctgaaatagagggaattgaagctaagttaaagttgttacaagatattacaaacctattgaattatattgaaaatagagaaaaaattgaaactaaaattgctaatagcaaaaaagatatttctaaaaccaataataaaatattgaatcttgattgtgataagcgaaacatagacaaagagaaaaaaatgttagaagaaaatggagatttaattgaaagtaaaatctcttttattgataaaactagagtattatttaacgatattaataagtatcaacaaagttatctcaatattgaacgcttgagaactgagggtgaacaattaggtgatgaattaaatgatctaattaaaggtttagaaacggtcgaagattcaataggtaataaccaaagtgattacgagaaaattatcgaactaaataatacgataacgaacataaataatgaaattaatataattaaagaaaatgaaaaagctaaagctgaattagataaactattaggtagtaagcaagagttagagaatcaaattaatgaagaaacatctatattgaagaatctcgaaataaaattagatcgctacgataaaacaaaattggacttaaatgataaagaaagctttataagtgaaattaaatctgctgtaaatattggagatcaatgtccgatatgtggtaatgaaattcaggatttagggcatcatattgattttgacagtattgctaaacgtcaaaatgaaattaaagaaattgaagcaaatatccacgctataaaatcgaatattgctgtgcataattctgaaattaaatttgttaatgaaaaaatatcgaatattaatattaaaacgcaaagtgatttttcacttgaagtattgaataagcgtctgctagaaaatgaaaatgcattgaataatcaaagagatcttaataaatttatagaacaaatgaaagaagaaaaagataatctaacgttgcaaattcataataaacaattgcgtctaaataaaaatgaatctgagttgaaattatgtcgagatctcatcactgaatttgaaacactctcgaaatataataatatcactaattttgaggtggattataagaagtatgttcaagatgtgaatcagcatcaagaactctcaaaggagattgaagataagttaatgcaattgtctcaaagaaagttaattgagcaaaataatctaaatcattatgaaaatcaactagaaacttacaataatgacttagaattgaatgaacagtctattgaaatggaaatgtcgaggctgaatttaactgatgacaatgatatagatgaaataatagcctggaggggcgagcaagaggaattagagcagaaaagggatacttataaaaaacgttatcatgaatttgaaatggaaatagctaggttagaatcattaactaaggataaagagttattggactctgataaattaaaagatgaatatgagctaaaaaaaggaaagatgaatacactgatagatgaatactctgctgttcattatcaatgtcaaaataatattaataaaacacaatctatagtttcgcatattaattacttaaatcaagaattaaaggatcaacaagaaatatttcaattggctgaaattgtcagtggtaagaataacaaaaatcttacattggaaaactttgtcttaatttactatttagatcaaattattgctcaagcaaatctgagattagcaacaatgtcagataatcgataccaactaattaggcgagaagcggtttctcatggtcttagtggcctagaaattgatgtatttgatttgcattcaaataagtctagacatattagctcgttatcaggtggagaaactttccaatcgtcgcttgcattagctttagggttaagcgaaattgtacagcagcaatcaggaggtatttcactagaatcaatatttattgatgaaggattcggtacattagatcaagaaacgcttgaaacagcgttagacactttattaaatcttaaatcaactggtagaatggttgggattatttcacatgtgagcgaattgaaaaatagaatacctttagttttagaagtgaaatcagatcaatatcagagttcaacaagattcaaaagaaattaaaacataaaaaatagagatggtactttggaatgtatagaacaaccttagcccatctctttttatttaaaaattattttttctcacgtaataaatctctgatttcagttaataacacaacattttcttccacaactgcttcttcttcggcttcttctttcttcattaatgtatttgcaatcttaacaaagatgaataaagcaaacgcgatgataataaagtcgataacagattggataaataaaccgtatttaataccccagaatgaccattctttagcaaaatcaactgatccgaaaattttaccaattaatggcataatgatattttctactaatgaagatataatcttgttgaaagctgcacccatcacaacagcaattgctaaatctaagacgttaccttttaaggcgaactctttgaattcttttaacattacactcaacctctcttttttaaatgtaacctcaattatacaacaaataaaaaaattagaaaatagattattcaagaaaatttgattatcgcaaagacctttgttatcctataaaggtgcgtgagttattgaataaaatgtttagataatatttttattctactacataaaattaaatatagaattgaagggagtaattaattatgaattcttcttcaccagagaatccaaatggaaagaagtattcaccagtcttcatctatagtgcaattgttgttgctatagtcgtattacttggtgcatttttacctgaacaattcaactatgttaccaataatattaaaatgtggattacagaaaagttaggttggtattatcttattcttactacgattatcgtgttcttctgtatattccttatttttagtcctattggaaaacttaaactaggtaaaccaaatgacaaacctgagtttaatacaatttcatggtttgctatgttgtttagtgctggtatggggataggtttggtgttttatggtgcagctgaaccgatggcgcactttgctacgccacctacagcagatcccaaaactactgaagcttatactgaagctctacgttcaacatttttccattggggattccatgcttgggctgtttatggtgttgttgcgttagcgttggcatattcgcaattccgtaaaggtgaaccaggtttattatctagaactttacgtcctcttttaggtgataaagtagaaggtcctattgggatttttattgacgttttatctgtatttgcgacaatcgttggggtagccgtttcgttaggtatgggtgctctacaaattaatggtggtttacattacttgttcaatgttccaaacaatacgtttgtacaagcgattatcatcattgttgttactatcttatttatagcaagtgcatggtctggattaagtaaaggtattcaatacttaagtaacttgaacattggtttaggtactattttaatggtagctgctttaattgttggaccaactgttcttattttaaatatgttaactagctctacgggtagtttactaaacacattcttgtttaatagttttgatacagcagctttaaatcctcaaaaacgtgaatggatgtcttcatggacactttattactggggttggtggttaagttggagtccattcgttggagtgtttattgcacgagtttcaaaaggacgttcaattagagagttcatttctggtgtcttgctagttccagcaattgttagttttgtttggtttagtgtctttggtgtattaggcatcgagacaggtaagaaacacaaagaaatttttgatatgactcctgaaacacagctatttggagtgtttaatcatgtgccatttggcattgttttatcgttgattgcattattattaattgcatcattctttattacatctgctgactcagcaacatttgtattaggaatgcaaacaacatttggttcattaaatccatctagtatggtaaaagttgtttggggaatttcacaggccttaatagcatttgtacttttattagctggtggcggtaacggcgctgaagctttaaatgcgattcaaagtgctgcaattataagtgcattcccattctcctttgtcgtcatactcatgatggtaagtttctacaaggatgcgaaccaggaacgtaaattcctaggtttaacattgactccgaataaacatcgcttacaagaatatatcaagagtcaacaagaagattatgaatctgacattcttgaaaagcgtcagtcacgtagaaatatagagaaaaaagataactaataaagtttagttaagtattttaataacaagtagtatgtcattctagtagctagaacagatatactacttgtttgtttttgtggaaaattgagtatattcaaaaggataagaacgagaatttcgttattaaactacgaattctcgatttttttatattttaagataggtttatttctgaaaacttaatagaaaggggtttgacaaagctaaagtgaagtttgacggtataaacgcaaattaaatatacttttatagaaaattaactcaggctgggacataaatcaatattctatgctctacgaagttatattggcagtagttgactgaacgaaaatgcgcttgtaacaagcttttttcaattctagtcaggggccccaacacagagaatttcgaaaagaaattctacaggcaatgcgagttggggtgagggccccaacacagaagctgacgaaaagtcagcttacaataatgtgcaagttggggatgggccccaacaaagagaaattggattcccaatttctacagacaatgcaagttggggtgggacgacgaaataaattttgcgaaaatatcatttctgtcccactcccatcaaaagaatgacattgaaaaaaatattaaagtttggtgccataattttctttctgctcaatgaaataatacgtttaaaaattgaattgaatcattcgcgaaattgataattattctcaattaataaaaaatacttattacaccttacctgtatgataagttttgcttatatactctgattaaaaagtcaaaacctaaattaagcgttttctaagcatgatgagttgtttatcaataaatataataatacaatttaatcaaggcatataaatataaaaatgtatcaagggggatcattaaatggctgcaaattttaaagagcaatcaaaaaaacattttgacttgaatggccaaagttatacttactatgatttaaaagctgtagaagagcaaggtattactaaagtttccaatttaccttattcaattcgtgttttgttagaatctttacttcgtcaagaagatgattttgtaattacagacgatcatattaaagctttaagtcagtttggaaaagatggaaatgaaggcgaggtaccatttaaaccttctcgtgttattttacaagatttcacaggtgtaccagccgtagttgatttagcttctttacgtaaagcaatggatgacgttgggggagatattactaaaattaatccagaagtaccggtggatttagttattgaccactcagttcaagtggatagctatgcaaatccagaagctcttgaacgtaatatgaaattagaatttgaacgtaactatgaacgttatcagtttttaaattgggcaacgaaagcatttgataattacaatgcagttcctcctgcaactggaatagttcaccaagttaacttagaatatttagcaagtgttgtacatgttcgtgatgtagatggtgaaaaaactgcatttccagatacattagttggtactgattcacatacaacaatgataaatggtattggcgtactaggatggggtgttggtggtattgaagctgaagctggaatgcttggacaaccttcttatttcccaattccagaggttattggtgtacgactagtaaattcattaccacaaggcgcaacagcaactgatttagcgttaagagtaactcaagagctacgtaaaaaaggtgttgttggtaaatttgtggagttctttggtccaggtgtacaacatttaccactagcagaccgtgctacaattgcaaacatggcaccagagtatggagcaacttgcggattcttcccagttgatgatgaatctcttaaatatatgaagttaactggtagatcagacgaacatatcgcgctagtaaaagaatatttgaaacaaaaccatatgttctttgatgttgagaaagaagatcctaattatacagatgttatcgaattggatttatcaacagttgaagcatcgctttcaggaccaaaacgtcctcaagatttaattttcttaagtgatatgaaatcatcatttgaaaattctgtaacagctccagcaggcaaccaaggacacggtttagataaaagtgaatttgataagaaagctgaaattaactttaaagatggatcaaaagctacaatgaaaacaggtgatattgcaatagcagcaattacatcatgtacaaatacatctaacccttatgtaatgttaggtgcaggtttagttgctaaaaaagcagttgaaaaaggcttgaaagttcctgaatacgttaaaacttctctagcaccaggatcaaaagttgttaccggatatttaagagatgctggcttacaaccttatttagatgatttaggcttcaacttggttggttatggatgtacaacttgtatcggtaattcaggtcctttattaccagaaattgaaaaagcgattgctgatgaggacctattagtgacatctgtattatctggtaaccgtaactttgaaggtcgtatccatcctcttgttaaagccaattacctagcttcaccacagttagttgttgcttatgcattagctggaacggttgatattgatttacaaaatgaacctattggtaaaggtaatgacggtgaagatgtatatttgaaagatatttggccatcaattaaagaagtttcagataccgttgatagtgttgtaacacctgaattatttattgaagaatataataacgtatacaataacaacgaattatggaatgagattgatgtaactgatcaacctctatatgactttgatcctaattcaacatacattcaaaatccatcattcttccaaggattatctaaagaaccgggtacgattgttccattaaatggtttacgtgttatgggtaaattcggtgattctgtgacaactgaccacatctctccagcaggtgcaattggtaaagatacgccagctggtaaatatttacaagatcatcaagtgcctattcgtgaatttaattcatatggttcaagacgtggtaatcacgaagtaatggttcgaggtacgtttgctaatatacgtattaaaaaccaattagcgccaggtactgaaggtggttttacaacttattggccaacaaatgaagtaatgcctatctttgatgctgcaatgaaatataaagaagatggtacaggtttagttgtattagctggtaacgattatggtatgggttcatctcgtgactgggcagcaaaaggtacaaacttattaggtgttaaaacagttattgcacaaagttatgaacgtatccatcgttcaaatttagttatgatgggtgtattaccattagagtttaaaaaaggtgaatcagctgattctcttggtctagatggtacagaagaaatttctgttaatattgatgaaaatgttcaaccacatgactacgtcaaagttactgctaagaagcaagatggtgatttggtagaatttgacgctatggttcgttttgactcacttgttgaaatggattactatcgtcacggtggaattttacaaatggttttaagaaataaattagcgcaataaaaaatagatatcacagtaaaattttaatcggtatttgaggcactttgatagtgctcaaaaatacttctataaactttatgatataataggtcggttcaaaacctttgtgttcttggccggcctcttcttgtattttatgttagaatgagatataaagttaaactgaaagaaggcttaaaatgatatatagtattacagaaatagaagcgcgttatgctgaaactgataagatgggtgtaatttatcacgggaattatgcaacttggtttgaagttgcgcggttggattatatatcgaagttaggttttagttatgctgatatggaaaaacaaggaatcatttcacctgtgactgacctcaatgtcaattataaaaagtctattttttatccagaaaaagttaaagttaaaacttgggttgaaaaatattcgagattacgttcagtgtataaatatgagatttttaatgaaaaaggtgaacttgcaactacaggttccacagaattgatttgcattaaagaagatacttttaagcctatacggttggatcgttatttcccagattggcatgaagcttatagtaaagtgcaaacgctcaataatgaagggaaaacagtagagataatggatggtattgattctttataagttactgtaaatgtttggagaggcaatattaacaattaatctataaaaaatagccaatacgttaacattaatgtaattagcgtgaagataagctaatatatagcaaaaacgaacttgttcatacaacatcagatgtgctaaaccaaagtacaacttccgaggttcaggacacatcagaatgtgtaaacaagttcgttttattttagttattttgtggaataagaaatttcatcttcgtgatcaactacatttacaataatgtggtcatcttcaaagtaccacaaatctttttccgctacgacaacatttaaatcgtcatattgttgttcatagccaatatcaacatcttcctttggttcaactgtaaaagcaggactaaatccttgcttgagttggaattcgccaccatatcttacaaaaaacacgagcactttattattttcaggcaactcaagttcatttttaaaccaagttactgctgcatcagtaagttctatttgcataacaatgacctcctatatttattacagaatgggagtgggccaacttgtattatttgtggaatttcttatcgaaattctctgcgttggagcccaccccaacctgctcattattgtaagctgaatttccataagcttctatgttgggacccccgaccagaattgaaaaaacctagttataagcgcattttgttcggttaactacagctaatataacattgtggagcctatgacattgatttatgtctcggtctcaaatgttcttgtaaaaaaactaagtatagttgaattttaagttaaaaaaattgtttttgcaaaaataaaataatccatcaactgcaaaaaaatatgcaatgatggactaatgtcaaaaaattgttacatccattttattttaggttcttcgcctctaaaaatccttgcgatattagagcgatgtctaattatcaatatgattgaaactaagaaactaacgactaataaaatatagtcttgaatgataagcgagccaatcacacagcaaattgctgcaacgatacttgctaaagaaacatatttaaaaatcttcaatacaataaagaagataattgcaagtattagtaaaagtatcggattgactcccaagacgacacctgcactagttgcaacagctttgccaccttggaattttaaataaacaggataaacgtgtccaagtatagcgaataagccaacaattaaaccatttgtaaaaaaagtactaatagggccatctgcgtgaacttgtaaccataaagggaagaaaacagttatgaaccctttgaaaatatctagaaatgttaccaagaatcctgcaggacgacctaatactctaaagctattagtagcgccagtattaccactaccaaattgtctaatatcttttttgaaaaataattttccaattacgaatccacttgggaaagcgccgataagataacttagtagtaacatgacgattatcatcataaatattacacatcctttaatatcttaggactattttatcatattcatttaaattacggctaaaaattttaaaaacggggattaatatatggaattaagctatgaaagttaattgatacttgcattttacgctgatttatataagaataactattgtatagttttaaaaacgaacgtacgtttgcaggaggcgaaatcattggcaatgaataaacaaaataattattcagatgattcaatacaggttttagaggggttagaagcagttcgtaaaagacctggtatgtatattggatcaactgataaacggggattacatcatctagtatatgaaattgtcgataactccgtcgatgaagtattgaatggttacggtaacgaaatagatgtaacaattaataaagatggtagtatttctatagaagataatggacgtggtatgccaacaggtatacataaatcaggtaaaccgacagtcgaagttatctttactgttttacatgcaggaggtaaatttggacaaggcggctataaaacttcaggtggtcttcacggtgttggtgcttcagttgtaaatgcattgagtgaatggcttgaagttgaaatccatcgagatggtaatatatatcatcaaagttttaaaaacggtggttcgccatcttctggtttagtgaaaaaaggtaaaactaagaaaacaggtaccaaagtaacatttaaacctgatgacacaatttttaaagcatctacatcatttaattttgatgttttaagtgaacgactacaagagtctgcgttcttattgaaaaatttaaaaataacgcttaatgatttacgcagtggtaaagagcgtcaagagcattaccattatgaagaaggaatcaaagagtttgttagttatgtcaatgaaggaaaagaagttttgcatgacgtggctacattttcaggtgaagcaaatggtatagaggtagacgtagctttccaatataatgatcaatattcagaaagtattttaagttttgtaaataatgtacgtactaaagatggtggtacacatgaagttggttttaaaacagcaatgacacgtgtatttaatgattatgcacgtcgtattaatgaacttaaaacaaaagataaaaacttagatggtaatgatattcgtgaaggtttaacagctgttgtgtctgttcgtattccagaagaattattgcaatttgaaggacaaacgaaatctaaattgggtacttctgaagctagaagtgctgttgattcagttgttgcagacaaattgccattctatttagaagaaaaaggacaattgtctaaatcacttgtgaaaaaagcgattaaagcacaacaagcaagggaagctgcacgtaaagctcgtgaagatgctcgttcaggtaagaaaaacaagcgtaaagacactttgctatctggtaaattaacacctgcacaaagtaaaaacactgaaaaaaatgaattgtatttagtcgaaggtgattctgcgggaggttcagcaaaacttggacgagaccgcaaattccaagcgatattaccattacgtggtaaggtaattaatacagagaaagcacgtctagaagatatttttaaaaatgaagaaattaatacaattatccacacaatcggggcaggcgttggtactgactttaaaattgaagatagtaattataatcgtgtaattattatgactgatgctgatactgatggtgcgcatattcaagtgctattgttaacattcttcttcaaatatatgaaaccgcttgttcaagcaggtcgtgtatttattgctttacctccactttataaattggaaaaaggtaaaggcaaaacaaagcgagttgaatacgcttggacagacgaagagcttaataaattgcaaaaagaacttggtaaaggcttcacgttacaacgttacaaaggtttgggtgaaatgaaccctgaacaattatgggaaacgacgatgaacccagaaacacgaactttaattcgtgtacaagttgaagatgaagtgcgttcatctaaacgtgtaacaacattaatgggtgacaaagtacaacctagacgtgaatggattgaaaagcatgttgagtttggtatgcaagaggaccaaagtattttagataattctgaagtacaagtgcttgaaaatgatcaatttgatgaggaggaaatctagtgagtgaaataattcaagatttatcacttgaagatgttttaggtgatcgctttggaagatatagtaaatatattattcaagagcgtgcattgccagatgttcgtgatggtttaaaaccagtacaacgtcgtattttatatgcaatgtattcaagtggtaatacacacgataaaaatttccgtaaaagtgcgaaaacagtcggtgatgttattggtcaatatcatccacatggagactcctcagtgtacgaagcaatggtccgtttaagtcaagactggaagttacgacatgtcttaatagaaatgcatggtaataatggtagtatcgataatgatccgccagcggcaatgcgttacactgaagctaagttaagcttactagctgaagagttattacgtgatattaataaagagacagtttctttcattccaaactatgatgatacgacactcgaaccaatggtattgccatcaagatttcctaacttactagtgaatggttctacaggtatatctgcaggttacgcgacagatataccaccacataatttagctgaagtgattcaagcaacacttaaatatattgataatccggatattacagtcaatcaattaatgaaatatattaaaggtcctgattttccaactggtggtattattcaaggtattgatggtattaaaaaagcttatgaatcaggtaaaggtagaattatagttcgttctaaagttgaagaagaaactttacgcaatggacgtaaacagttaattattactgaaattccatatgaagtgaacaaaagtagcttagtaaaacgtatcgatgaattacgtgctgacaaaaaagtcgatggtatcgttgaagtacgtgatgaaactgatagaactggtttacgaatagcaattgaattgaaaaaagatgtgaacagtgaatcaatcaaaaattatctttataaaaactctgatttacagatttcatataatttcaacatggtcgctattagtgatggtcgtccaaaattgatgggtattcgtcaaattatagatagttatttgaatcaccaaattgaggttgttgcaaatagaacgaagtttgaattagataatgcagaaaaacgtatgcatatcgttgaaggtttgattaaagcgttgtcaattttagataaagtaatcgaattgattcgtagctctaaaaacaagcgtgacgctaaagaaaaccttatcgaagtatacgagttcacagaagaacaggctgaagcaattgtaatgttacagttatatcgtttaacaaatactgacatagttgcgcttgaaggtgaacataaagaacttgaagcattaatcaaacaattacgtcatattcttgataaccatgatgcattattgaatgtcataaaagaagaattgaatgaaattaaaaagaaattcaaatctgaacgactgtctttaattgaagcagaaattgaagaaattaaaattgacaaagaagttatggtgcctagtgaagaagttattttaagtatgacacgtcatggatatattaaacgtacttctattcgtagctttaatgctagcggtgttgaagatattggtttaaaagatggtgacagtttacttaaacatcaagaagtaaatacgcaagataccgtactagtatttacaaataaaggtcgttatctatttataccggttcataaattagcagatattcgttggaaagaattgggacaacatgtatcacaaatagttcctatcgaagaagatgaagtggttattaatgtctttaatgaaaaggactttaatacagatgcattttatgtttttgcgactcaaaatggcatgattaagaaaagtacagtgcctctatttaaaacaacgcgttttaataaacctttaattgctactaaagttaaagaaaatgatgatttgattagtgttatgcgctttgaaaaagatcaattaattaccgtcattactaataaaggtatgtcattaacgtataatacaagtgaactatcagataccggattaagggcagctggtgttaaatcaataaatcttaaagctgaagatttcgttgttatgacagaaggtgtttctgaaaatgatactatattgatggccacacaacgcggctcgttaaaacgtattagttttaaaatcttacaagttgctaaaagagcacaacgtggaataactttattaaaagaattaaagaaaaatccacatcgtattgtagctgcacatgtagtgacaggtgaacatagtcaatatacattatattcaaaatcaaatgaagaacatggtttaattaatgatattcataaatctgaacaatatacaaatggctcattcattgtagatacagatgattttggtgaagtaatagacatgtatattagctaaaaactatatgcaatcacgaaattaaatgataaaatacagtaatgttaaattttgactaaattcaagggatttatattaaatgctgaccaagtacttatcgttaaattagcgatatactttgaccaaactaatataaatctcttgtattgtataagaaatgatgatgtatctctatatttactgaaggttcaattcggtctaattttatagaaggtacatgattcatgtagaggatgcgaggggtttattttgaaagatttcgatagtttaatacctggatggtttaaagaatttgtccatgttggtaccgatttaatatggtctcaatatttaattggtctattattgacagctggattcttctttacgattagttctaaattcgttcaattacgaatgttacctgaaatgtttagagctttagtagaacgtccagaaactttagaagatggtaagaagggtatttcgccattccaagcatttgcgattagtgctggttcgagagttggtactggtaatattgctggtgttgcgactgcgattgttttaggcggtccaggtgcagtattttggatgtgggttattgcatttataggtgcagcgagtgcatttatagaagcgactttggctcaggtttataaagtacatgataaagatggtggattccgtggtggtccagcttactatattactaaaggtttaaatcaaaaatggctaggtatcgtatttgcgattttaattacaattacatttgcatttgtatttaacacagtgcaatctaatacaattgcggagtcgttaaatacgcaatataatattagtccagtaatcacaggtattattttagcaatcgtaacagctattattatatttggtggtgtacgtagtattgctacgttatcttcgttaattgtaccgattatggctatcatttacattggtatggttttagtaatattgctatttaatttagatcaaattgttcctatgataggtacgattattaaaagtgcatttggtatcgaacaagtaactggtggcgctgtaggtgctgcggttcttcaaggtatcaaacgtggtttattctctaacgaagctggtatgggttctgcgccgaatgcagcggcaactgctgccgtaccacaccctgttaagcaaggtttaatccaatcattaggtgtgttctttgatacaatgttggtttgtacagcaactgcaatcatgattttactatattcaggactgaaatttggtgataacgcacctcaaggtgttgcagttactcaatcagcacttaatgagcatttaggttctgctggaggtattttcttaacaatagcagttacactgtttgcattttcatctgttgtaggtaattactattacggtcaatctaatattgaatttttatcaacaaaccgtgtaatattatttatctttagatgtcttgttgtagtacttgtctttgtcggtgcagttgtaaaaacagaaacagtatggaatacggcagacttatttatgggcttaatggcaattgtaaacattatttccattataggactgtccaatgtagcttttgcattgatgaaagattatcaaaagcagaaaaaagaaggcaagaaccctgtctttaaacctgaaaacttagaaattaacttatttggaattagtgcttggggcgctaacaaatataagaactctgataaataaatatttttaatgtaacgattcattatataaaaatcaaataaaccctgaggttttcaaattaaagcgaaaatctcagggttttaaatttgtactcaattatcatctgtatcattacactagttaatctaagatttgattatatattaatatagtaaggttgagatttatttcctccattggtgtgcaaagactataccattgataagacatattgttggatagatgaatataaatttgttttagctttgcacaatttaatagtacgttttagtttgtattgagtattaattcagataatatataaataaatagaattatttgtaaatatgggagtcagatttttttattatagttattccactttgagagacatcgaaattaaattaagatatatcatataggataggcgtgtaatagaacacaagtatttaaattattatactttcaagttagacatttccgatatataatcttaataatagaaaaataggtgatgataatgggagaatatattgttactaaaacattgaacaacaatgtcgtagtatgtactaataatgatcaagaagttattttaatcggtaaaggtattggttttaacaaaaaagagggaatggcgttaaacgaccaaactattacaatagagaaaatttataaattagaaagtgagcaacaaaaagcacattataaaagtttagttgaaatcgctgatgataatgtattacaagtaattattgattcgttgaattttatttctaatactgcgatgaatgttgattcaaaacaacttgtagtttcattaacggatcatattatatttgcttataaacgcttaaaacaaaatcaagttattagcaatccatttgttatggaaactatgcagttatatagtgatgcatatcatattgctaaacaggtgattgatcagttaaatgcagcattagatgtacattttcctgaagatgagataggatttattgcattacatattgcatctaatacagaagatttatctatgcatgagatgaccttgatcaataatgttattaaaaaaggtatagatatcattgaatcagaccttgtgacaactgttgataaggaatcattacaataccaacgttttataaggcacgtacaatttttaattcgccgattaagaagaaaagaatatatacatgcacaagatgattttgtgtctatgattaaaaatcactatccgatttgctataacacagcatataaaattttaactatgatacaaaaacaatttgatgttaatatcagtgagtctgaaattatatatttaacattacacattcatcattttgaagaaaggattaatcaatcctaaattaagtgtattacacgggcgtttcgttactgtaaagggtatttgtatggtatcattgatgttagtaattttacataagtggactgtttttatacaacatcttatgaatattttaagtggtggtgaatctataattgaatgaaaatgaaaagaatataagaaagaattttttaaaatttaccgaatcacggtatatgaagtttgttggtgggaatgatttagtcttctcattaatagcgctagtattgttgggtattgttatttttattttcgaaaaagtatcatatgtttttgatccttttatcatcgtttttaagacgatagcagcacctatcatcgtctctttaattctattctatctatttaacccaatcgtaaatatgatggaacgttatagaataccaagagttgcaggtatttctattatttatctagctgtagtaggtgttattacgttaattgttaatttattgatacctattattggttcgcaagtagatagtttagttaaaaattcaccgcaatatctagaaaaattaattaattctattgataaaatagcaaataatacgtttttctcttcgtattatagtcaaattaatgattggttaaattctttacctaagaaaataccatctatgttaagtgaatttacagatggctttgggtctaaaattgcaacgtttgcagaaacgattgctaatattggcgttgtgattgtcacaacaccatttgtactattctttatgcttaaagatggacatcacttcaaagaattttcaacgaatattatgccaccgaaattccgaaaagattttcatgatctacttgaaaaaatgagtgttcaagttggttcatacattcaaggacaaattatcgtttcattctgtatcggtatactgttgtttatcggttattcggttatcgggttgaaatatagcttagtattagctagtattgcggcagttacaagtgttgtaccatatttagggcctactatagcgatttctccagctattgtaatagctgctataacatcgccgtggatgctcttaaaattagcagtagtatggactttagtacaatttgttgaagggcacttcatttcaccaaatatcatgggtaaaacacttaagattcatccacttacaatcattttcattttactgtgtgcaggcaaattgcttggtattgtaggcgttattttaggtattccgggatatgctattttaaaagtattagttactcatttattccaattatttaaacgtcgatacaatcgtttctatggtaatgatgtaggtgaatatgatattaaagaaagtaataaaatagttgaataagtaataaaaaataccaatgactatatgtttgttggtattttttatggtgcttataatgttgggcagttacatttatgattatcagcacatgtttagcttataaatttttacgaaagtttagccgtttataaagcacatgcataatgaaacgagtatttgccacttgattagtacttcattattatgtcgaaaataaaaataagtggtatttttaatatattaagaagcactcataatcggctgttaattaataatatttttcataagtattgattcatcattttctttatgttaaatatgaatcagtatagataaccatattgttctgtttgagatagaaatattttctatttacttcttaatacagatatcaatatgacaaaagtgttatataaatcaaaggtaaatgatatgctatttttatggtttatatgatatattttgatttataacagaaataattagaattgatgtgaaaaaatgaatcaggaagttaaaaacaaaatattttcaatcttaaaaattacgtttgctacagctttatttatttttgtagcaatcacattgtatcgggagttatctggtattaactttaaagatacgttggttgaatttagtaagattaaccgtatgtccttagtgttactatttattggtggtggggcatcgcttgttattctatcaatgtatgatgtgattttatctagagctttaaaaatggatatatccttaggcaaagttttaagagtaagttatatcatcaatgcattgaatgcgattgtaggtttcggtggctttattggtgcaggcgttagagcaatggtttataaaaactatacgcatgataaaaagaaattagttcactttatatccttaatacttatttcaatgttgacaggtttaagcttattatcattgctaattgtattccatgttttcgatgcatctttaatcttagataagattacatgggtaagatgggtattatatgtagtgtcatttttcttaccattattcattatttattcaatggttagaccacccgataaaaacaatcgttttgtaggattgtactgcactttagtgtcgtgtgttgaatggttagcagctgcagttgtattatatttctgtggtgtaattgttgacgcttatgtatcattcatgtcctttattgcaatatttatcattgctgcattatcaggtttagtcagctttattcctggtggtttcggcgctttcgatttagttgtattactaggatttaaaactttaggtgtccctgaggaaaaagtattattaatgctacttctatatcgttttgcgtactattttgtaccggtaattattgcattaattttatcatcatttgaatttggtacatcagctaagaagtacattgagggatctaaatactttattcctgctaaagatgttacgtcatttttaatgtcttatcaaaaggatattattgctaaaattccatcattatcattagcaattttagtattctttacaagtatgatcttttttgtaaataacttaacgattgtttacgatgctttatatgatggaaatcacttaacgtattatattctattggcaattcatactagtgcttgtttattacttttactgaatgtagttggtatttataagcaaagtagacgtgccattatctttgctatgatttcaattttattaatcacagtggcgacattcttcacttacgcttcatatattttaataacatggttagctattatttttgttctgcttattgtagctttccgtagagcacgtaggttgaaacgcccagtaagaatgagaaatatagttgcaatgcttttattcagtttatttattttatatgttaaccatatatttattgctggaacgttatatgcattagatatttatacgattgaaatgcatacatctgtattgcgctattacttctggcttacgattttaatcatcgctatcatcataggtatgattgcatggttgtttgattatcaatttagcaaagtacgtatttcttctaaaattgaagattgcgaggagattattaatcagtacggcggtaattatttgagtcacttgatatatagtggtgacaagcagtttttcactaatgaaaataaaacagcatttttaatgtatcgttataaagcaagttcattagtggttcttggagatccgttaggtgatgaaaatgcctttgatgaattgttagaagcattctataattacgctgagtatttaggctatgatgttatattctatcaagttacagatcaacacatgcctttatatcataatttcggtaaccaatttttcaaattaggtgaagaagcaattattgatttaacgcaattttcaacttcaggtaaaaaacgccgtggatttagagcgactttaaataaattcgatgaacttaatatttcgttcgaaattattgaaccaccgttttcaactgaatttataaatgaacttcaacatgtaagtgatttatggctagataatcgtcaggaaatgcatttctctgttggtgaatttaatgaagaatacttatctaaagcgccaattggtgtaatgcgaaatgaagaaaatgaagtaattgcattttgtagtttaatgccaacatactttaatgatgccatttcagtcgatttaattagatggttgccagagttagatttaccattaatggatggtctatacttgcatatgttactttggagtaaagaacaaggttatacaaaatttaatatgggtatggcaacgttatcgaacgttggtcaattgcattattcatatttaagagaacgacttgcaggccgtgtctttgaacatttcaacggtctatatcgtttccaaggattacgtcgttataaatctaaatataatccgaattgggaaccacgctttttagtttatcgtaaagataattcgctttgggaatcactttctaaagtaatgcgtgtaatacgtcacaaataattaaaatccaagtgctaagaggtatacagttatgcctgatgcgcttggattttttggtttctataaagaatgatttataaaaaacggtacagataagaatatttaagtttcctatctgtaccgtattttaatattgaaatgagctaaagttaagtcgcctaacttttattatcagtccaatcagtttcatcaagtataaatgttattgcttatttttgtattcttggcgtattttttgttcttctgcatagcgctctggatttttcttataaaaatcttggtgatagtcttcggctttgtaaaattgtgacgctggtaatatttttgttgcaattgccttatcagcattaatcgtatttttaagctgctcgatataagtctcagcgagttctttttgatgatcattagtgtagaaaatagctgtttgatattgaggaccacggtcttgatattgaccacctgtatctaatgggtcaatgactgagaaaaatatttctaataacttattgtatgagaataatgcaacatcatattgaatttcaacagtttctaaatgaccactcgtacctgattttacttgttcgtaagtaggattttcaatatgtccgcccatatatccagaagttactttttctatgccgtcaaaggtgtcaaatggtttcgtcatacaccaaaagcaacctccggcaaaataagctgtattaatattcatttttgacatcctttcattagaccttagtacgatttattaagaaatcacttgctttttgaattgtttttatataacgttaatatgtgattattatagtacacaaaaatctatttttgaagatataaggtaggtaaatatggataaagaaactaatgacaacgaatatagacgtcaaagtgaacatcgcacttcggcgcctaagcgaaaaaagaagaagaaaattaggaaattacctatcattcttctgattgttgtaattttacttatcgcattagttgtatatattgtacatagttacaatagcggtgtagaatatgccaagaaacatgcgaaagatgttaaagtacatcaatttaatggaccagtaaaaaatgatggtaaaatttctattcttgtactcggtgcagataaagcacaaggtggacaatcaagaacagattctatcatggttgttcaatatgactttatcaataaaaagatgaaaatgatgtctgtcatgcgtgatatttatgcagatattccaggatatggaaaacacaaaattaattcagcatacgctttaggtggtccagagctacttagaaaaacacttgataaaaatttaggaattaatcctgaatattatgcagtagttgattttactggatttgagaaaatgattgatgaattaatgcctgaaggtgtaccaattaatgtcgaaaaagatatgtcgaaaaatattggtgtatctttgaaaaagggtaaccataggttgaatggtaaagaattacttggttatgcaagattccgtcacgaccctgaaggtgacttcggacgcgtgcgacgtcagcaacaagtgatgcaaacattgaaaaaagaaatggttaattttagaacagttgttaaattaccaaaagttgcaggtattttaagaggctatgtgaatacaaacattcctgattcagggattttccaaacaggtttgagttttggtatccgaggtgaaaaagatgttaagtcattgactgtgccaatcaagaactcatacgaagatgtcaatacaaatactgatggtagtgcattacagattaataaaaacacaaataaacaagctattaaagactttttagatgaagattaaaaataaacaaggcgatttctatcatactcagatagaagtcgccttgttcgttttcaaagaattaattggcatgcatcttatgaagaattattgatctgactttcttacgccagccacaccataatggtttggtttcatttcttctataacaacgtgaattgcttgtctatttgcccccgttgttttttctacggcgtcagttacttcgctaactaaattttttaattgttcatccgaacgaccttctaataattttacattgacgattggcatcatccaaacctcctaatcattattaatttgagtatatcatgtaatacttaaaaattcatttgcaaaataacagaacatttgttctaaaatagttgaaatagaacacgtgttcgtatataataagattcaagtaagggaggaataacagtgtataattatcatttattagaagatagggatgttctatgtattgaccaaaaaagtttttttgcgagtgtttcttgtattgaaaaggggctagatccattagaaacaaagctagctgttgttgcagatactaagcgtcagggttctgtaatattggctgcgacacctaaattaaaagaattaggcatcaagacagggtcgcgattgtttgaaataccacatagaaatgatatttacattatcaatccaagtatgcgtaaatatcttaatgtttcagttgctatttctaagattgcattgcgttatattccacctgaagatttacaccaatatagtattgacgaattttttatggatgttactgatagctatcatagatttagttctacagtacatgcattttgcgaaagacttaaacgtgaaatttatgaagaaacaggcatttattgtactgtgggcattggttctaatatgttattaagtaaaattgctatggatgttgaagcgaagcatagtcaaaatggtatagctgaatggcgatatcaagatgtaccaacgaaattatggccaattcagcccttgcgagatttttggggtattaatcgtcgaacagaagccaaattgaataaaagaggaatttttactataggagatttagcgaaatatccatataaatttttaaaaaaagagttcggtattttaggtgttgatatgcatctacatgcgaatgggatagatcagagtaaagtacgtgaaaagcacaagatcagcaatccatcgatatgcaaaagtcaaatattaatgagagattatcattttgatgaagcaaaagtagtaatgcaagagttaattgaagatgttgctagcagagttcgagcaagaaaaaaagtggcaagaacgatacattttgcctttggctatagtgatgaaggcggtgtacataagcaatatactttgaaagatccaacaaacttagaaaaagatatttataaagtagtaatgcatttcgcagataaattatgtaataaacaagcactatatcgtacgctaagtatatctttgagtcaatttattaatgaggatgagcgacagttaagtctgtttgaagatgaataccaacgcaaacgtgacgaatgtctagctaaaacgatagaccaattacatttgaaatacggcaaaggtattgtgtccaaagcagtatcgtttacagaagcaggtacaaaacacggcagattaggtttaatggctggacataaaatgtaatgactatacggtttaagtaatatataactgtgattcgtataaaataagtctctaaagataaatatttcatatatcacaatagattttcacaataatatctaagaatacatggaatttatcaaaagagacttaataattattggatataacaatcaaaatcactcaatgcttgcataccgcgttctcggtcagtagggtttttgaaactaatttttaaagcaccgtatatatcttcgcgtacttctaagattcttaagttgcttatagatatgttatgtaaactcaggatataagtcactttacttatcatacctgattcatccggaatgtctacatatagatcatacgcagtatttagtccacctagttgtttagcgggtagtgcgtcgcgatacgatttagcttgggcaaaaaatgataacaatttttcagaatcattgctttcaattagtctttctaaatcttgaaactgactttttagctgtcgaatcatttctaaaatatacgttttattactcaaggtgatatctttccacatttgtgcattactactagctatacgagtgatatcacgaaaaccaccagctgcaagtttattaactaaatgatgttcttgaccgttcttttgactaacatgaactaaactagatgcaacgatatgaggtaaatgacttacgacgcttgttacgtagtcgtgttcttcagcagtagttacaataaatttagcaagagtaggtgataacagttcttttaacgtgtttgctgcttgctcatttcttggctcattgtagactaaaatataataagcgttttcaaataagtgctttttagcatttagtacaccagatttatgactaccagccattggatgaccactgactaaatgaatattatgctttaataaattgcattcgtgttgctgtatcattgctttagtactaccagtatcagaaacaataacaccaggtttagttggcatatctataagctcgctaagatatttatttgtgatagcaacaggtgttgcataaataattacatcggcttttttaatagcttcactataatttaaacatttttcattaataatgccgattgatttagctttatctaactgagaaatatctgcatcgtatgcaataatattagtattagggttatggtattttatattgctagcaagacttccaccaattaatccaagcccaacaaataaaactgttgtcatataaatcaccttatttcgaaattttcagaataataacattgtaaatgagctgttgacacagtgcaatagtaaataaaaatcgataatagcattaatagataaacggagataaatcatctacaataaagagtatagtaacacaatggcaacggaggggtaaatcaatggaaccaatattagaaatgattaaaacattaacaggtattaatagtccttcaggagacacagaagaagcaattcaatttgtcgaaaaatatgcaaaagacttgggttatcaaacaacactaacaaataaaggtgcgttattaataacagtgccaggcaaaaatgatgaagtacaacgctgtattactgctcatgttgatactttaggtgcaatggttaaagaaattaaagaagatggtcgcttagcaatagaattaattggaggattcacgtataacgcgattgagggtgaatattgccaaattaaaactgatgctggtcaaatatatacaggaacaatttgtctgcatgaaacaagtgttcatgtatatagaaataatcatgaaatacctagagatcaaaagcatatggaaataagaattgatgaagtaactacatcagaagaagatacaaagagtttaggtatttcagtaggtgattttgttagctttgatccacgtacagttatcacgtcatcaggttttattaaatctcgtcatttagatgataaagctagcgtagcgatgatactacaattactaaagaaattaaaagaagagcaaataatattaccacatacaacgcaattttatatttctaataacgaagaaataggttacggtgcaaatgcatcaattgattcgaaaatcaaagaatatattgcattagatatgggcgcgttgggagacggtcaagcatcggatgaatatacagtttctatttgtgccaaagatgcttcaggtccatatcataagcaattgaaatcgcacctagttaatctttgcaaaataaataacattccatataaagtagacatatatccatattatggttcagatgcttcagcagctttacatgctggtgcggatatcagacatggtttatttggcgctggcattgaatcatctcatgcaatggaacgaacacatattgattctattaaagcgacagagaaattactatatgcatattgcttatcaccaattgagtaaacaattagtgttgacaaatgtgaacgacctatgtaatataatgaactataaaaataattagaattttctaaagaaatagtagcagatatgaaacgtagcaaatagaaagctaatgggtgatgggaattagcacgccatatcttgtgaattggactttggaaaacaattgaatgagttttgaaagtgaacatgaattatgttaactaaggtggcaccacggtaacgcgtccttacaggtatatgcgttatgtggtgtctttttatttagacaaaatgtagtagttaattaaaggtagcaacagaaagttagtggatgatgtgaactaacaccgagattaatgaaattgggttttgtctgcaacagaaaaattatatatagtaaagagtgaactatgaatatttcgaatattcggttaatttaggtggtaccacgcgtcagcgtcctttatattgataaggatgctggcgcttttttgaaaggagcgtatagaatggatatattttataaaaaaataaaagcaaatgtaacgcccgaagttttagcacaacttcattccaagaagatcattttggaaagtacaaatcaacaacaaactaaaggtcgctattcagttgttatttttgatatttatggcactttaactttagataatgatgtattatcagtaagtactttaaaagaatcgtatcaaatcactgaaagaccgtaccattatttaacgactaaaataaatgaagactaccataatattcaagatgagcaacttaagtcattaccatttatatctggatatgttgggacgtgtagctttgatttagtaagacatgaatttcctaaattgcaatcaatacaattagaagatcacaagcagcacgatgtaaggttatatatggttgaacaagtttatgtatttgaccattacaaagatgagttatatatcatcgcgacgaatcaattttcaaattcaacaaaatcagatcttgagaatcgagttattaagtctatcgaagacttaactaaaatccaaccattcatgcctacacaagattttgattttaaaactaaagaaattcaatcaaacatttctgaagaaagatttatcgaaatgattcagtatttcaaagagaaaataacagaaggggatatgttccaagttgtgccatcaagaatttacaaatatgcgcatcatgctagtcagcatttaaatcaactttcgtttcaactgtatcaaaatttaaaacgacaaaacccaagtccatatatgtattatcttaatatcgatcaaccatatattgtcggtagttctcccgaaagtttcgtaagtgtcaaagatcaaattgtaacaactaatcctattgcaggtacgattcaacgtggtgagacgacacaaatagataatgagaatatgaaacaactacttaatgatccaaaagaatgcagcgaacatcgtatgctagttgatttaggacgtaatgatattcatagagtaagtaaaatcggtacctcaaaaattactaaattaatggttattgaaaaatatgaacatgttatgcatatcgtaagtgaagtcacaggtaaaataaatcaaaatttatcgccaatgacagttattgcgaatttattaccaacaggtaccgtttcaggtgcaccaaaattacgtgcaattgaaagaatatatgaacaatatccacataaacggggcgtttatagtggtggtgttggatacataaattgtaatcataacttagattttgcattagcaattcgaacgatgatgatagatgagcagtatatcaacgtagaagctggttgtggcgttgtatatgattctattcctgaaaaagaactgaatgaaacgaaattgaaagctaaaagcttattggaggtgagcccatgatcttagttgtagataattatgattcctttacatataacctagtggatattgttgctcaacatactgacgtcattgttcaataccctgatgatgataatgtgctgaatcaatcggtggacgctgttattatatctcctggtccagggcatccattagacgatcaacagttaatgaaaatcatatcaacctatcaacacaaacccattttaggtatttgtttaggggctcaggcactgacttgttactacggtggagaagtcattaaaggcgacaaggttatgcacggcaaagttgatacactaaaggttatatcgcatcatcaacatctgttatatcaagatataccagaacagttttcaattatgagatatcattcattaataagtaaccctgacaattttccagaagaattgaaaattactggacgtaccaaagattgtatacagtcattcgagcataaagaaagaccgcattatggtattcagtaccatcctgaatcatttgctacagactatggtgtcaaaataattacaaatttcattaatctagtgaaggaaggatgaaaaccatgacattactaacaagaataaaaactgaaactatattacttgaaagcgacattaaagagctaatcgatatacttatttctcctagtattggaactgatattaaatatgaattacttagttcctattcggagcgagaaatccaacaacaagaattaacatatattgtacgtagcttaattaatacaatgtatccacatcaaccatgttatgaaggggctatgtgtgtgtgcggcacaggtggtgacaagtcaaatagtttcaacatttcaacgactgttgcttttgttgtagcaagtgctggcgtaaaagttataaaacatggtaataaaagtattacctcaaattcaggtagtacggatttgttaaatcaaatgaacatacaaacaacaactgttgatgatacacctaaccaattaaatgaaaaagaccttgtattcattggtgcaactgaatcatatccaatcatgaagtatatgcaaccagttagaaaaatgattggaaagcctacaatattaaaccttgtgggtccattaattaatccatatcacttaacgtatcaaatggtaggcgtctttgatcctacaaagttaaagttagttgctaaaacgattaaagatttaggtagaaaacgtgcaatcgttttacatggtgcaaatggtatggatgaagcaacactatctggtgataatttgatatatgaattgactgaagatggagaaatcaaaaattacacattaaatgcgactgattatggtttgaaacatgcgccgaatagtgattttaaaggcggttcacctgaagaaaatttagcaatctcccttaatatcttgaatggtaaagatcagtcaagtcgacgtgatgttgtcttactaaatgcgggtttaagcctttatgttgcagagaaagtggataccatcgcagaaggcatagaacttgcaactacattgattgataatggtgaagcattggaaaaataccatcaaatgagaggtgaataatatgacgattttatcagaaattgttaaatataaacagtcacttttacaaaatggctattatcaagacaaacttaataccttgaaaagtgtgaagattcagaataaaaaatcttttataaacgcaattgagaaagaaccaaagctagcaattattgcagaaattaaatcgaagagtcctacagttaatgacttacctgaacgagatttatcgcaacaaatctcagattatgaccaatatggtgcaaatgccgtgtccattttaactgatgaaaagtactttggtggtagttttgaaagattacaagcattgacgacaaaaacaacattacccgtattatgcaaagactttattatagacccgcttcaaattgatgttgctaaacaagctggtgcatctatgattttattgatcgttaacatcttatctgataaacaattgaaagatttatataactacgctatatcgcaaaatctagaagtgttagttgaagtacatgatcgccatgaattagaacgtgcctataaggttaatgctaaattgattggtgtaaataacagggacttaaaacgatttgttacaaatgtggaacatacaaatactattttagaaaataaaaaaacaaatcattattatatttctgaaagtggtattcacgatgcatctgatgtaagaaaaatcttgcatagtggtatcgatggcttactaataggtgaggcgcttatgcgttgtgacaatctatctgaatttttaccacaactgaaaatgcaaaaggtgaagtcatgatgaaattgaaattttgtggctttacatcaataaaggatgttacagcggccagtcaattacctattgatgcgataggtttcatccattatgaaaaaagtaaaaggcatcaaacaattacccaaataaaaaagttagcgtctgctgttccaaatcatatcgataaagtatgtgtcatggtaaatcctgatttaacaacaattgaacacgtattaagcaatacgtcaattaacacaatacagttacacggcacagaatctattgattttatacaggaaattaaaaagaaatattcaagcattaaaatcactaaagctttagctgcagatgaaaacataatccaaaacataaataaatataaagggttcgtagatttatttattatcgacacaccctcagtgtcgtatggtggtaccggtcaaacatatgactggactattttgaagcacataaaagacataccttatttgatagcaggaggcattaactctgaaaatattcaaacagttaatcaacttaaattatcacatcaaggttatgatcttgcatcaggtatagaagtaaatgggcgaaaagatatagaaaaaatgacagcaattgtaaatattgtgaaaggagatagagacaatgaataaacaaatacaaacagaagcagatgaattaggtttctttggtgaatatggagggcaatatgttccagaaacattaatgccagcaattattgagttgaaaaaagcttataaagaggcaaaagcagacccagagtttcaaagagaactggaatactatttatcagagtatgtaggacgcgcgacaccacttacatatgctgcatcatatactgaaagcctaggtggcgctaaaatatatttgaaacgagaggatctaaatcatacaggcgcccataaaattaataatgcgttaggtcaagcgttgcttgctaaaagaatgggcaagaagaagcttgttgctgaaactggtgcgggtcaacatggtgtagctagtgctacggttgctgcattatttgatatggaacttgttgtctttatgggaagtgaagatattaaaagacaacaacttaatgtatttagaatggaattacttggtgcaaaggttgtggcagttgaagatggtcaagggactttatcggatgcagttaataaagcattgcaatattgggtaagtcatgtagatgatacacattatttattaggttctgcattaggtccagacccgttcccaacgattgttagagattttcagagtgtgattggtaaagaaataaaatcacagatattgaagaaagaaggtcgacttccggatgcaattgtagcatgtatcggtggtggctcaaatgcaatcggtacattttatccatttattaaagatgatgttgcattatacggtgttgaagccgcaggtcaaggcgatgatactgataaacatgcacttgcaattggcaaaggatcacctggcgtattacatggtactaaaatgtatttaattcaagatgaagatgggcaagtgcaactagcacattctatttcagcaggacttgattatcctggtattggaccagaacattcttattaccacgacattggtagagtaacttttgaaaatgctagtgatacacaagcaatgaatgctttaatcaactttacaaaacatgaaggtattatacctgcaattgaaagtgcacatgcactgagttatgttgaaagactagcgcctacgatgtcgaaagaagatattattgtagtaactatttctggacgtggcgataaagatatggaaacaattagacaatatatggtagagcgaggtcttgcaaatgactaaattatttataccttatattatgggcaataaagatttgattgaaaatgcaacattgttgagtgaaaatggtgcagatataattgaaattggagtacctttctctgatccggttgctgatggtccagttatcatggaagcaggtcaacaagcgattaaacaaggcatcacgatagattatattttcaatcaattagaaaaacatggtgatcaaattaagtgtaactatgtattaatgacgtattataatattatttgtcattatggagaacaagcgttttttgaaaaatgtcgagatactggtgtctacggcttaattattcctgatttaccatatgaattatcgcagcgtttaaaacaacaatttagtcactatggcgtcaaaatcatatcgttagttgcgatgactactgatgacaaacgtataaaagatatcgtatcccatgcggaaggctttatttatactgtgacgatgaatgcgacaacagggcaaaacggtgcgtttcatccagaattaaaacgaaaaattgagtcaattaaagcgatagccaatgtgccagttgtcgcaggatttggtataagaacaccacaacatgttgcagatataaaagaggttgcagatggcattgtcattggtagcgaaatcgttaagcgatttaaatctaacacgcgtgaggaaatcattaaatatttacaatctatccaacaaacattgaataattaagtttacttgatttaaaaaaattaggcgaatactgtttgaaaaagtgaaaaacggtgaattataaaattgaatacaatttcaaaaaaagtaatatgagcaaacccaaacgttcatattactttttttgaaattgtattcaaaaatctaaatattactataaaagtatacgcaattaaagcgtttatgttttagttttaacattaactattgtatacttatttagattagatttattatttttgacatttgcagaggggaaatagaaaaactgcaaatacggaaatgaaattaattaacgagagacaaataggagtaatgataatgaagtttacaaatttaacagctaaagagtttggtgcctttacagatagcatgccatacagtcatttcacgcaaactgttggccactatgagttaaagcttgctgaaggttatgaaacacatttagtgggaataaaaaacaataataacgaggtcattgcagcttgcttacttactgctgtacctgttatgaaagtgttcaagtatttttattcaaatcgcggtccagtgattgattatgaaaatcaagaactcgtacactttttctttaatgaattatcaaaatatgttaaaaaacatcgttgtctatacctacatatcgatccatatttaccatatcaatacttgaatcatgatggcgagattacaggtaatgctggtaatgattggttctttgataaaatgagtaacttaggatttgaacatactggattccataaaggatttgatcctgtgctacaaattcgttatcactcagtgttagatttaaaagataaaacagcagatgacatcattaaaaatatggatggacttagaaaaagaaacacgaaaaaagttaaaaagaatggtgttaaagtaagatttttatctgaagaagaactaccaatttttagatcatttatggaagatacgtcagaatcaaaagcttttgctgatcgtgatgacaaattttactacaatcgcttaaaatattacaaagaccgtgtgttagtacctttagcgtatatcaactttgatgaatatattaaagaactaaacgaagagcgtgatattttaaataaagatttaaataaagcgttaaaggatattgaaaaacgtcctgaaaataaaaaagcacataacaagcgagataacttacaacaacaacttgatgcaaatgagcaaaagattgaagaaggtaaacgtctacaagaagaacatggtaatgaattacctatctctgctggtttcttctttatcaatccatttgaagttgtttattatgctggtggtacatcaaatgcattccgtcattttgccggaagttatgcagtgcaatgggaaatgattaattatgcattaaatcatggcattgaccgttataatttctatggtgttagtggtaaatttacagaagatgctgaagatgctggtgtagttaaattcaaaaaaggttacaatgctgaaattattgaatatgttggtgactttattaaaccaattaataaacctgtttacgcagcatataccgcacttaaaaaagttaaagacagaattttttaggaagggaattatcaaaacatgaaatttacagagttaactgttaccgaatttgacaactttgtacaaaatccatcattggaaagtcattatttccaagtaaaagaaaatatagttacccgtgagaatgatggctttgaagtagttttattaggtattaaagacgacaataacaaagtaattgcagcaagccttttctctaaaattcctactatgggaagttatgtttactattcgaatcgtggtccagtaatggatttttcagatttaggattagttgattattatttaaaagagttagataaatatttacagcaacatcaatgtttatatgttaaattagatccgtattggttatatcatctatatgataaagatatcgtgccatttgaaggtcgcgagaaaaatgatgccctagtaaacttgtttaaatcacatggttacgagcatcatggctttacaactgagtatgatacatcgagccaagtacgatggatgggcgtattaaaccttgaaggtaaaacacccgaaacattgaaaaagacatttgatagtcaacgtaaacgtaatattaataaagcgataaactatggtgttaaagtcagattccttgaacgtgatgagttcaatcttttcttagatttatatcgtgaaactgaagagcgtgctggatttgtatcaaaaacagatgattatttttataactttattgacacatatggagataaagtattagtaccattagcatatattgaccttgatgaatatgtgttaaagttgcaacaggaattgaatgacaaagaaaatcgtcgtgatcaaatgatggcgaaagaaaacaaatcagataagcaaatgaagaaaattgcagaattagataagcaaattgatcatgatcagcatgaattattgaatgcaagtgaattgagcaaaacggacggcccaattctaaaccttgcttctggcgtttattttgcaaatgcatatgaagtgaattatttctctggtggttcatcagaaaaatataatcaatttatgggaccatacatgatgcattggtttatgattaactattgcttcgataatggctatgatcgttataatttctatggtttatcaggtgattttacggaaaacagtgaagattatggcgtataccgctttaaacgtggatttaatgtacaaatcgaagaattaataggggatttctataaaccaattcataaagtgaaatattggttgttcacaacattggataaattacgtaaaaaattaaagaaatagatgtaaatgatgttagggcttatagttattgatactataggctcttttttatatgttttttaataaagcctcgaataatgatatattaaatgacaagtttaacaagtgattgcaataaatataaatatgaattgcacaacctatttgtaaatgattgagttgagtatactttttaattcattcaatatgactcaaaacaagccaatatgtattatatttttggtgaataaaccttagcataacaatttatgtctgattatatatgtgtgtgtttgcaagtgtgtgatatcaaatgtcatatttgtctaattgtaatttataaaatgcatgagcaatgattgctgtaacaaattctagcaaagtattcagtttgtattttagaaataaaaatgatgatagatgtatgatcgatataaaagatttaatatgcaccaaaacgtgagtaattggtttaatgaaacataacatgaatgtaaatttagcttactgacataaacactacacaaacatacagttatataagtccccttatggaatttcacattctagtttacataatatatattataggaagttatatgtgtgtaacgcaaaaggtaccctacatcataatcattatctaatatcgtcacataacttacttatgctataatcatggtattatattgtttggagtgatttgatgagatttgtctttgatattgatggtacgctttgttttgacggccgattaattgaccagactattattgatacattgttacaattacaacatgatggtcatgaacttatatttgcatcagcacgtccgattcgtgatttgttgccagttttaccatcagtatttcatcagcacacattaattggcgcaaatggtgctatgatttcacagcaatcaaagatttctgttatcaaaccaattcatactgatacatatcatcatatcttcaaaataattcaaaagtatgagttagattatattattgatgatgattggaattatgctgcacaacttgacgctgagaacgcgatttttgagcgtttagatccacataagctggccagttgtattgatgttgcaaatatcgacacgccaatcaagattattttattaaatatagacccggcacaaattacaactatattagacgagctagataaataccatcaagaattggaaatgattcaccattcaaatgagtataacattgatataacagcgcaaaatattaacaaatatactgcattacaatatatatttgatgcagatgttaaatatatagcatttggtaatgaccacaatgatattgtcatgttacaacatgctagtagtggctatattataggaccatcagaagcatacacacacgcaatattgaaacttgataaaatcaaacacatcaataataatgcacaagctatttgcaaagtcttaaaatcatataaataaaaacacccctatcaaatgataatcattatcaatcgataggggctattttaataaaattcgtcctcgaacatttcttcctcttcatctaatccaaataattctgccatttctccatgttcaattaacatgtttaaatatgcatcgcggagttcttcttcactcatatcattaatcatttctttaagactatcaatccacatatttctgcgtaattgatagtcttcttcaacttcgtttaacatcattatatgtttatttgctgcttctggactagctgtaaagagtaatgcaatcatatgtttacatatcactcgtcttccatcagcatgaggacaattacatatggattttctaggatgttccatatcaatataacaacgatatactttgttgccactgccctttacttcagcctcatgctgcgtttctgaaaatgattttaagttaatgacgcattcactttgataataattaaagcctctttctatagaacgaatacttgcaatatcaagtaatcccattaatgatactcctttttattattatttttaaataaagaaaataaaatagataagtgtctagattaaaatacttgatttatctatattttataacaagtctagaattatcgcattcttaaataactaatatgaaaatgcttgcactaattcttttgtataagggtgtctatcaacattaaataattcctctattgcaaaatcatcgactatcatgccatccttaagaacgataattctattaactaagcgttgtaacacggataaatcatgagaaataacgataaaatgatttaagttcgtaatcgtttgcgcttttaatatattgattacattttgttcagctataacatctaaatttgaagttatctcatcacatattaaaacgcgaggctgtgctaataacgaacgcatgacattaaatctttgtaattgtccgccactcacttcgcttggtaatttagtcaataattgcgcgtttaactcaaaagtagataaatgttgtaataataattgatcctgagcagtattatcagttagacctctgtaataatataacgcttcttttaatgaggtctcaatcgtccaatcagggttaaagctagttaaagggtgttggaaaatcggtaacacagcattgtcacttaagtaaatctctcctttaacaggtttaaacaagccaagaaccaatgaagcgagcgtacttttaccacagccactttcgcctaaaataccaacattttctccatcaggtatagtaatattgatatcttgtagcaccatctgctttttattataaccaaaagtcacatgttttaactcaatcatagtaatccctctttaattgtgttctatatttaattagacgttcagtatacggatgcaaatgctcatacttgaaatgattaatattacctcgttcaatgatttgaccttcttttaaaacataaatgtactgacaatatttcaatacatgacttaagttatgtgtgataataaataatgtttgaccatgttctaatacaatatgctgtaataaatccatcacttgattaccgttcaaagcatccaatgatgcaactggttcgtctgcaatgattaatttaggctccaacatgagaacgcttgctatgtatacgcgttcaagttggcccccagaaagttggaaactatatttatttaatatatctttgctttgtaaattaacccacgacaaagccttatcaactttggacaaagcctcttctttactacctttataatgcttacgataaatcgcagttaactgtttacctaatttagtatggtcgttaaaactttctgcataattttgagaaatatagccaattgtatgaccataatattgactcaatctactaacattttccccatcaaattggtacgaatcatacgtgcagcttaaatcaaatggtaaatattcaagtaaagctttagcaatcaaactttttccagcgccgctctctccaatcaaggcattaatctgttgactaaaaattttcaaatcaatccctttaataagagatttctcactagtattctttattgttaaattttgtatatcaatgagactcatcatattcaccccgttgtttcagcaatctatctcttagtgcatcaccggttaaattaaaaattaaaatagttatagcaatgactgaagcaggtgcaatcaacataattggatgagacgaaataaaatcacgaccttgttgcaacatagcgccccactctggtgttggcggttgtgcacctaacccaataaatgatagtgaacttatatatagaatgattttaccgaaatcaacgaccatcaaaacgataatagccggtataattttaggtgttaaatgacgtattaatattgttcttgttggtacatgaaataattgtgccatttttatataaggcttattcatttcgctattaactatacttctagtcaaccttgtgtaattcatccattttattaatgtaattgagataactaaattccataaagatggttgaaaaaaacttgctaaagcaatcatgatgataaattctggaatacttagaccaacatcaataaaccttaacactaatcgttcaatccacccttttttgtatccggcaaatagacctagtgtaacacctatgacaacgatagctattaatgttaaaacagtaacaaacaatgttgaacgtgcaccgataataattcgggtaaataaatctctcccataatcatcagttcctaataaatgcaaccaactaataggttcaaaagtttgtgataaattgactttggttgcattttcactactgacaaagaattgcagtacaattaccacaaaaataaatgcaacgaatacaaaaaatatcaggttattctttgaaaatattttatgcatgacggtcactactttctgatatcaatggtgtattggttttgatttttggatttcctaattgtaaacgctgcttcggatcaagtaataacgttaataaatcagcaatcgtattgataataacaacgaagaagccaataaataacacgcatccttgaataacaggataatctcgagatttaatactatccattaatagataaccaataccaggtatatcaaataaattttcaatcactacagtaccacctattagactgccaagtgaaatccctagtaatgggataatcggcaaaattgttggttttagtaaatcatgaattaaaatataacgttcattcataccgcgtaatcttgatgcttgtacgatattactttgcaataacatcaataaattagaacgcactaaacgaatgatgtatgcacacatacctaaagatagcgtgattacaggtaatataaactgacttagtataacgctatctatattcattaaatttgtgacaataaataataaaataataccgataaagaacgctggtaaactaatcgatagtgttgagatcactctaatcactttatccgtccacttatgaaatcgtttggctgctataatgccgagcggtatagatatgcataacgacactactaatgttgaaaatgatatgagtaatgttatgggtgcatagttgaataatatctgtgttaccggttcttttgattcaaaactttttcctaaattaaaatgtaataaatgattcatccaatgccaccactgtaccaataaagaatcatttaatcccaatttatctttggttgcatttatttgttccgtcgacacttgtgctacatcaagatgtaatattttatcaacaggattgcctggtgataatttcattaaaatgaatgtaagtgtagaaataacaaataaaacaactatcatttgcatcagtctatacaacatagactttattatgaacataatagtccccctccttgtgtaagttactaacactttctttttacatgagaatggcgcatgtatatgcaacttacatattaagaactaacgttcattatagtattatccataaagaaattgaagtatatttaattttttaacaaaatcattataaaatataatattttgaatcaagtcaaccatgtaaaatataaaaaagtcaaaacaaaaacaactatagcactgtattccatctctttcgaaataattgttactgcagtgtaacttaaaagtcgatgattttgtgcatatagttgtcgaatattattttttatctttacggcgaagttcagcgccctcatagccgtatttttcaatttgcttttctaatttacgcgcttttctttctttacgccaatttctagtaaaataccataatagaaaactaattaataaactcataatcgctaaaaatgcagcgtatcctaataatggttgatattttatatcttgaaaatttggaataaaaaatgcaagcacacctaatataacaaatgtaattactgcagatacaaaccatttatttaaaactaagcaacagaatattgttaataaaatcattattaatgttgtgatccataaataattaggcatatcgaataatgtcatattcattctccttttatttcattactttccttgtatacattttattataaatttttaaaaacttaaacaatagcagtcagtttcaagcaatattctatctactaatagaaaaatcattgttccttgcgacatggaaatcgtaacattatcgtttaggagacaaaattatgtataatgaatgtattataccaaaggagtgattatatgtctcaaggtttacctttaagagaagatgttcctgtttcagaaacatgggatttagtagacttatttaaagatgatcaacaatattatgaaagtattgacgctctagtacaacaagcaaatcaatttcatcatacatatgcaacaacattaaattcaatcgaacaaattaatactgctttagctgaattagaaaatattttaattgccttagatcgcttaagtaattatgcagaactacgtttaagtgtagatactagtaatatcgaggcacaagtattgagcgctaaattatctactacatacggtaaaattgttagccaattatcatttgtagagtcagaaatacttgaattaccagaagaaatacttcaacaattagaagaatcatgtccatatcaacactatattaaacagttaataaaacaaaagccattccaattatctgcgtcggtagaacaagtattagcaactttatcacctacgctaaacagtccttacgatttatacggcacgacaaaaatgctagatattacattcgattcatttgaacatgatggtacaacgtaccctgtcgactatgctacgtttgaaaatgattatgaagataataaagatcctgagtttagacgtaaaagtttcaaatcgtttagcgatgggattcgaaaatatcagcatactaccgcggctacatataatatgcaagtacaacaagaaaaaattgaagctgatttacgtggatttgaatcagtcatcgattatttattacatagtcaagaagtaacgcgtgatatgtttgaccgtcaaatcgatatgattatgcgtgacttggcaccagttatgcagaaatatgctaaacttttacaacgtattcacggattagataacatgcgttttgaagacttgaagatttctgtagaccctgattatgaaccagagatttcaattgaagactcaaaaaattatattttcggtgcgttaagtgttttaggtgatgactatacaaacatgttacgtgaagcatacgatcagcgatggattgattttgcacaaaataaaggtaaagatacaggcgcattttgtgcaagtccatactttacacattcatatgtgtttatttcttggactggtaaaatggctgaagcatttgtcttagcacatgaattaggtcatgcaggtcattttacattagctcaaaaacatcaaccatatcttgaatcagaagcatcaatgtactttgttgaagccccttctacaatgaatgaaatgttgatggccaattatttatttaacacaagtgataatccaagatttaagcgttgggttattggctcaattttatctagaacatattatcataatatggttacccatttattagaagctgcttatcaacgtgaagtgtatcacaaagtagatcaaggtgaatctttaaatgcgccgacattaaatgaaataatgctaaatgtttataaacaattttttggagatgcagtagacatgactgagggtgctgaattaacatggatgcgtcaacctcattactatatgggattatattcgtatacgtattctgctggcttaacaatcggaactgtcgtttctcaaaagattaaaaatgaaggccaaccagctgttgatgcttggttagaaacattgaaaaaaggtggtagtgtatcacctgtcgaacttgcaaacattgcaggtgtagacattactacagaacagccacttaaatctacaattcaatatatttctgatttagtcgatgaagttgaaaaattaacagatgaaattgagcaagcaaataactaagatgcgagacaatttatagtagaacaatataaaccaagattttcacattactaattgtgagaatcttggtttttttgagggtttatgaataatagaaatatatatttatcgtaagggattttatagtaataactttaagttattgttcgtaatgtgtacctgttaaataaaaataaacactttcagcgatgttaataatatgatcaccaatacgttctaaatgtcttgctgctaaatgagcttgtgcagcgacaaatggatcgttatcaataagatacgttgcgttaataatatgactatataagtcatcgatatcttcatcacgctcaattatttctcttattaatacggtatctttctttttaaatgcttgatctaagtcctttaacattaacatagctaatttacccattgtctttaaacgggttaacacataatcatctgtaatctttgtacgcaatcgaatattggcaatactcgaggcattatctcctattctttctaaatcggaggcgatttttaatgaagaaatcatcatacgcaaatcactcgcaatgggctgttgctttgtaattaacatgataactcgctcattaatatcataatttaattgattgatatgtttatcgtttttaactgtttgtcgtgcaaagcctctatcgtcaatacttaatgattttataccattttcaatactcacatagacatttgcacctaaccgacgtaattcttttattaaatcatcaagttgctcctgatatcgttgtctaattattgccattatatatcaaccaaaccttcctgaaatataatcttctgttttcttgtttgatgggttagagaaaattttatcagtatcatcatattcattgacataaccatttaagaaaaatgcagttttatctgatacacgagctgcttgttgcatattatgtgtaaccataataattgtatacttttcttttagttcttgaaccaactcttctactcttaatgttgagattggatctaatgctgatgtcggttcatccattaaaatgacttcaggttcaattgctaaacaacgcgcgatacaaacacgttgttgttgcccaccggataaactatatgcatttgtgtgcaacctatcctttaattcatcccaaattgcagcgccacgtaatgatttctcaacgatttcatcaagaacttttttatttttaataccgtgaatctttggaccgtaagtaatattatcgtatattgattttggaaatggattaggttgttgaaagaccatgcccacatttgtacgtaattgttctttagaatatttttgatcaaaaatgtcttgatctcgatataatattttaccagctgttttcacagaaggtactaactcaaccattcgattcaaagttttaatatatgttgatttgccacaaccagatggacctataatggcagtaatttggttttcataaatatctaaattaatattttgtaatgcatgattttcgccataccataagtctaaattttgtgttgaatatataacagaatgtgagtttgtatcatctggtgttttatgatgactttgtgagacatcaaacgtatgactttgagatatttgtttagtttgtgcaagtgtttgcgccatatttaaaactccctttttaatagataaatgagattgattgtttaaattagaattttttactaaatttgttacgtaaaataatcgcaacgccattcattaagattaagataactagtaaaacgataatgcctgccgatgcaacattctggaattcttcttgaggcattttcgcccaagtaaatatttggataggtaatgctgaaaattgatccaatatacttctaggtgttgccaataatatagtcggtataccgattagcacaagtggcgctgtttctcccagtgctcttgaaagagacaaaatgaatccagttaaaataccaggtaacgctgctggtaagacaacacgtcttatcgtttgccatttattagcacctaagccgtaagaagcttcgcgtactgagttaggtacagctctaattgcttcctgacttgaaacaataataattggtaatatcagtaaggtcattgttagcgctgctgccaatatactgttacccattttcaaggcttcaatccctgcaccaccaacgaacaaagtataacctaataacccaaatacaactgatggtacaccagctaaattggaaatactgattttaacaaactgagtaaatttgttgtttttcgcatattcttctaagtatatagctgtacctattcctaggatgattgataatggaatgatacttaacattaaccaaagtgaaccgattaacgcgcctttaacgccagccatagatggtgttgaagaagaaaaattagtgaaaaactgtaaatttaaatgacttacccctttaatcaatgtttgagttaacaacgcaataagtacgacaagtcctaataatgtacatgctaaaaatatgagtttgaacactttatttttaaccgttctggatgataaatgtttttggacaagttgttgatcgacgagtgattgtctattattatctgtcgtttccatattaatactcctccctaaaacgcttagaaatccactgagaaagtaaattcatgattaaggtaaagataaatagtgtgaaccctacagcataaatactgtaataaatatttgatccaaatgttgcatcacctgtcgctatctcaacaatatatccagtcattgtttgaatcgaacttgttaaacttaatgaagctgttggcgaactacctgccgctaatgatacaatcatcgtttctccaattgctcttgaaatcgcgagaacgattgaagctacaatacctgatgttgctgcgggaagtacgactttagttgctacttctaatttagttgctccaagtccataggcaccttctcgaattttatttggtacagatgccattgcatcctcactcaaacttgtgatgagagggacaatcataataccgacaactaagccgggacttatagcattaaactctccaagacctggtatgaaagatcttaatactggtgtaacaaaggttaatgcaaagaaaccaaacacaattgttggtattcctgctaaaatttctaatatcggtttaattatgcgtcgtgcacggtcacttgcatattcacttaaataaattgctgcaccaagcccgactggaactgcaaatatagtcgcaataactgtgatttttaaagtccctattatcaatgcccagataccaaacttagggtctgaaccggtaggattccaagtagtagaaaatagaaattcagttattggaattctggtgaaaaaagtgatggtttctaaaagcaatgtgattaatatacctagtgttgttaaaatggaaatcgctgaaattgcggctaaaataactggtataattttgtcattatgctttccttttttattattatttttttcgattaaagctttaacattagtagatgaagtcataatcaaacctctttctattactcccaaaataattagatttgtaaaataatgatgaaccactattttaagttgataagcttgtagactaactgaatgtcaaaatcagcgtctcgataaatcaagctttgtactctaaataatgattcaccatcaaaatcatgtttcaagacacatttgaaattgcgtcttattattttttgtcttcagactttttatcatcagatttcttgtcgtctgatttttgatttttatcaataaatgcttttaaatcatctaattgtgatttgtatgttttctctggtgctgctacatatccagcttcttcagctgctttacctttatcttctaagacgaatttgataaattctgacattactttattatctttcaatgctttttcatttacataaatgaataatggtctacttaatgcataagagttatcttgaattgtttttttcgtaggctctgttgctttaccattttcatctttgattttaacttcttttaatttatctttattttgtacgtagaagttatatccaaagtatccgattccctctttgtttttcgttacagaagaaacgatagcatttgtatcagcatttttttctgctttaatatcttctttattcattacttcattttcaaagaagtcataagtaccatgacttgagtttggtgatacagcatttatttttttatctggccatttactattaacatctttccatgttttagcttttccagaataaattgcttttaattgctgtttgtctaattcatctacaaaatcattttctttatttacagcaaccgttacaccatcttgcgcaattttgaattctttgtatttgatattcttatcttgtaatttttgcttctcttcatctttaattggtctagaagcatcagcgaagtcgatatctcctgcaatgaatttttggaaaccagcacctgtaccagcttgtcctgctgagattttagcatccgagtgatcttgagcccatttttcatttaatttctccacaattggtgctactgttgatgagccatcacctttagcttccccttttaaatcactattaccactgccaccattaccgccaccacaagcacctaataatagtgttgcacctaaagctgtagtaccaacaaattgccattttttcattgaaatatcctccctgtatgaacaacaaatagtatttgtattgattacatctttatcttaaccttgaattattaacctcatttttagaaactgtaaatgttacataaaaaattgttaagaaaatgtaaatattaatttttgttaatctaaaaaatattgcttcattagtaaaattaaaatgcttcctgaaaaattatcgaaatttaaatatgaatacaaaaatggctgggacataaatccctaaaaaaacagcagtaagataattttcaattagaaaatatcttactgctgttctctatttatacaatacttcgtattgaatggcttcgctttgcccgtctgtcacattactgtaaaattctataaatagaatttttgatgacgggtcccttcctagggtgccgtctcagccaccccaaccggcacattgttgtaagctgactatatgtcagcttctgtgttggggcccctgtcttcgactggcactgctccctcaggagtctcgccattaatactacgtattaacatgtaattttactttgaaatacattaaagcccaaattaatcaaaagctttctgaaccagaaacgaaaaaaatctatagtcatagaaaaatttatgtagagcctgtttttggatttatgaaggctattttgggtttcactcgaatgtcagttcgaggaataaataaagttaaacgagagctaggttttgtattaatggcacttaatataaggaaaatagcagctcaacgagctgtacattataaaatacatatcaaaaaagctgatttccatcaaataattaatagaaatcagcttttttacattgcctaagaacttaatgtcccagcctattcgtttgaattatttaattttttactttgaaaggaatgtttaaaaaactacttcatctgtccgatttaatattgaataaaaaaaacacgcatcctacgacacgtgtaaaaatgattattcttttgagtccattcgactccaaccttttttagttaaagcgattttacctgtttctatattaataatcttctgtttatataagtgaccgattgcacgtttgaatgaacctttactcatattgaatacttctttaatcgcttcagggcttgatttgtcccagaatggtaattcaccatcatattcaactagtaaatcaaagatgacttggccgtcatcgtctaaacgttcatgtgcaagtggtaaaaatgaaccatttaactcacctttatcattatgcccgataattctaacttgaacagattcacctaatcttggttcagctttacgttctgattcatgtacgaaaattttgtaacctgattcgcttaataaaaagctaccaattcgtaatacgcggtaaggtttggcttcaatgacttcgttttttaaattatcgtcgtgtacaggtgtaaacatattttctacaacagattcactcgctaaacgtccatacatatgattctcacggtcaattcgtaatgtaactagcaaataatcaccaggttgtggccatagtgatttcacttttggtaaatcttcccatggtactaacacttcacggggtaatccaacatctatacgtgccccatcgcgatccgttttaagtactttagcaaagtcatatttatctttcgtaatatcaggcatattttgagttgcaaataattcacctgaacggtttggataaatgaagaaactatattcttcacctacttctaattcatcatcatcgttcatttctgattggtttaactttacgttttcaccgtttggtccttttaaaaggtaagttgaaccttgtaaccctactacttcaaggaattctatagaacctactatatctttgtctaatgccatgttattctccttcgattcttgtattctttattattataacatgtgtgagtcattctatcattacaacttatatgaggtcgaaactgtgacgataatatgatataattcttccgttagaatatcgaatgaaaaaaaggagaaaatgcatgttacaagtaactgatgtgagtttacgttttggagatcgtaaactatttgaagatgtaaatattaaatttacagaaggtaattgttatggattaattggtgcgaatggtgcaggtaaatcaacattcttaaaaatattatctggtgaattagattctcaaacaggacatgtttcattagggaaaaatgaacgtctagctgttttaaaacaggaccactatgcttatgaagatgaacgcgtgcttgatgttgtaattaaaggtcacgaacgtctttatgaggttatgaaagaaaaagatgaaatctatatgaagccagatttcagtgatgaagatggtatccgtgctgctgaacttgaaggtgaatttgcagaaatgaatggttggaatgctgaagctgatgctgctaaccttttatctggtttaggtatcgatccaactttacacgataaaaaaatggctgaattagaaaacaaccaaaaaattaaagtattattagcgcaaagtttattcggtgaaccagacgtactattactggatgagcctactaacggtctcgatattccagcaatcagttggttagaagatttcttaattaactttgataatactgttatcgtagtatcgcatgaccgtcatttcttaaataatgtatgtactcatatcgctgatttagacttcggtaaaattaaagtttatgttggtaactatgatttttggtatcaatctagtcagttagctcaaaagatggctcaagaacaaaacaagaaaaaagaagaaaaaatgaaagagttacaggactttattgctcgtttctcagctaacgcttctaaatctaaacaagcaacaagtcgtaaaaaacaactcgagaaaattgaattagatgatattcaaccatcatcaagaagatatcctttcgttaaattcacacctgagcgcgaaatcggtaatgacttactaatcgttcaaaatctatctaaaacgattgacggtgaaaaagtattagataatatttcattcacaatgaatccaaatgataaagcaattttaattggggatagtgaaattgcgaaaaccacattgcttaaaatattagccggtgaaatggaaccagacgaaggttcatataaatggggtgtaacaacgtcattaagttacttccctaaagataactcagaattctttgagggcgttaatatgaaccttgtagattggttaagacaatacgcaccagaagatgagcaaactgaaacatttttacgcggcttcttaggccgtatgctatttagtggagaagaagttaagaaaaaagctagtgtactttcaggtggagaaaaagtacgttgtatgctaagtaaaatgatgttatcaagtgcaaacgttcttttacttgatgaaccaacaaaccacttagacttagaaagtattactgctgttaatgatggacttaaatcattcaaaggttctattatctttacttcatatgactttgaatttatcaatacaatcgcaaaccgtgttatcgatttaaataaacaaggtggcgtttcaaaagaaattccatatgaagaatatttacaagaaatcggcgttttaaaataaacataatatgtagaatttcttttcgaaaatctctgtattgaggcccgaccaacttgcacattattgtaagttggcttactgtcaccttctatattgggacttattccgcaacttgtattgtttgtagaaattaggaatccaatttctctatgtgttgcaccgacaaggattgaaaaaagctagctacaaagtcattttcattcagtcaactactgtcaatataacattgcagggcctagggcattgattcatgtccgagactatattcaatttaatagacattaactgggcgtctcgatgctaatatttatagcatcgaggtgtcctttttattttattttttaacacatcagcatagtgaacaccccttctctaaattacaaatacagttatcaacgcattaaaagagtacatttatttaatgtgcatattgattatgctataagtattttgaattttatttttcaaaaagtctcattatcaccaccttttaaaatataagcaacgctataacttgaattttcaggttattccaaaaaatctaaattatcggtttacattcatatttgtcatatgtataatgaacacataccaatttaataatattttgatgaggcgcatcaatcatgagtaaagtttagattactgtctgctaacagctaaatttgaaagggtgcgatgccgaagcaattataatagcagttataatttgttggactttttggttaagagctgagagtttgtcattatttaaaaataatggagtgcatcacttgtatatagattaagagcaagttcgcattccgaacttgttctttttttattattgtgtgcccttcctaacaattaggaggattatatggtaacaagaagtgtgttgaaatttggcggatcatccgtcagtgattttacaaaaataaaaaggatcgctgaaatgttaaaggagcgagtcaatcaagatgaacaattaattgtcgttgtaagtgctatgggtaacacaacagatcaattaatgacgaatgtatcaaccttgactaaagcaccaaaacaacaagaactggcattattattgacaaccggagagcaacaaactgtatcttatttatcaatggtattaaatgatatcggtatgaatgccaaagcaatgactggctatcaagcgggtattaaaaccattggccatcatttaaaaagtaaaattgctcaaattaatcctcaaacatttgaacaagcctttcaagaaaacgatattttagtagttgctggatttcaaggcatcaatgaacatcaggaattaacaactttaggcagaggtggttctgatacgaccgctgtggcacttgctgttagtaatcaaataccttgtgaaatttataccgacgttgatggtgtgtatgccactgacccaagacttttaccaaaggctaaacgactagacatcgtctcatatgaagaaatgatggaaatgagcgctttaggtgctggtgtacttgaaacaagaagtgttgaattagctaaaaactataatatccctttatatttaggaaaaactttatcgaacgtgaaaggaacatggattatgtcaaatgaagaaatattagagaaaaaagcagttactggtgtggctttggataaacatatgatgcatgtaacaattagttatcccctacctgacaatcagctacttacccaactatttacggaacttgaagaaggtgctgtaaatgttgatatgatttcacaaatcgtcaacttggatgggctacaactatccttcacgattaaagatagtgattttcatcaaatttctatgattcttgaaacattaaagaatcaatatgaagcattagcttataaaatcaatgagcattatgtcaaaatttcattaattggctcaggcatgcgtgatatgtcaggtgtggcatcaaaagcatttttgacattaattgaaaataatatacctttctaccaaacaacaacatctgaaataagtatttcatacgtcattgatgattttaatgggcaacaagcggtagaaaaactatatgacgcatttaacatttaatggtaaaatgattgttaaaatattctaaaaattggaaattattataaaatggagtgacaagttatgacaaagttagcagttgtgggtgcaacaggattagtaggtacaaaaatgttggagacattaaatcgtaaaaatattcctttcgatgaattagtattattttcatcagcacgttctgcagggcaagaagttgaatttcaaggaaaaacatatacagttcaagaattaactgatgctcgtgcaagtgaacatttcgattatgtattaatgagtgctggtggcggtacaagcgaacactttgccccactttttgaaaaagctggtgcaatcgttatagacaattcaagtcaatggcgtatggcagaagatattgatttaatcgttccggaagtcaatgaacctacatttacaagaggtatcattgccaatccaaactgctctacgattcaatctgttgtacctctaaaagtattgcaagatgcttatggtttaaaacgagtggcatatacaacatatcaagctgtatcaggttcagggatgaaaggtaagaaagatttagctgaaggtgtaaatggtaaagcaccagaagcatatccacatccaatttataataatgtgttaccgcatattgatgtgtttttagaaaacggatatacaaaagaagaacaaaaaatgattgatgagacgagaaaaattttaaatgcgccagacttaaaagtaacagcaacatgcgcacgtgtgcctgttcaagatagtcatagtgttgaaattgatgtaacgcttgacaaagaaacaacagcagaagatattaaagcgttatttgatcaagatgaccgcgttgttttagtagacaatccagagaacaatgaatatccaatggcaatcaattctactaataaagatgaagtgtttgttggccgtatacgtagagatgattcattagaaaatactttccatgtatggtgtacatcagacaatttattaaaaggtgctgcattaaatgctgtacaagtattggaacaagttatgcgtttaaaaggagcgaattaaaatgacacatttatttgagggtgttggcgttgcacttacaaccccttttacaaataacaaagttaatattgaagctttgaaaacacacgttaattttttactagaaaataatgcccaagcaatcatcgttaatggaactactgctgagagccctactttaacaacagatgaaaaagaacgcattctaaaaacagttattgatcttgtagataaacgtgttcctgtcatagcaggaactggcactaatgatactgaaaagtcaatccaagcttcaatccaagctaaagccttaggggctgatgcaattatgttaattacgccctactacaacaaaacgaaccaacgtggtttagtcaaacactttgaagcgattgcagatgctgtgaaattaccagtcgtgctgtacaatgttccttcaagaacgaacatgacaattgaaccagaaactgtagaaatattaagtcaacatccttatatagttgctttaaaagatgctacgaatgattttgagtatttagaagaagtgaaaaagcgcattgatacaaattcatttgcattatatagtggcaatgatgacaacgtcgtcgaatactatcaacgtggcggtcaaggggttatctctgttattgccaatgtcattcctaaagaatttcaagcgttatacgatgctcaacaaagtggattagatattcaagatcaatttaaaccaatcggcacactgttatcagctttatcagttgatattaacccaattcctattaaagctctaacaagttatttaggatttggaaattatgaattacgtctaccattggttagcctagaagatacagatactaaagtgcttcgtgaaacatatgacacatttaaagcgggtgaaaatgagtgaaaatattactaattggctatggcgcaatgaatcaacgcgttgctagattagcagaagaaaaaggacatgaaatcgttggggtcattgaaaatacaccgaaagcaacaacgccatatcaacaatatcaacatattgcagatgttaaaggtgccgatgttgcaatagatttttcaaatccaaatctgcttttccctttattagatgaagattttcatttgccattagttgtggcaacaactggcgagaaagaaaaactacttaataagttagatgaattgagtcaaaatatgcctgtgtttttcagcgcgaacatgagttatggcgttcatgcattgactaaaattttagcagctgctgttcccctacttgatgatttcgacatcgaattgactgaggcacatcataataaaaaagtagatgcaccaagtggtacgttagaaaaattgtatgatgtgatcgtatctttgaaagaaaatgtaacacctgtgtatgatagacatgaattaaatgaaaaacgccagccacaagatattggtatacattctattcgtggaggtacgattgtcggtgaacatgaagttctatttgctggcactgatgaaacgattcaaatcacgcatcgtgcacaatcaaaagatatttttgcgaatggtgcaatacaagcagcagaacgcttagttaataaaccaaacggcttttatacgtttgacaacttataaacatattaaaggagatcgattattttatggtacaacatttaacagctgaagaaattattcaatatataagtgatgctaaaaagtctacaccaataaaagtatatttaaatggtaattttgaaggcatcacatatccagaaagttttaaagtatttggttcagaacaatctaaagtaatcttttgtgaagcggatgattggaaacctttttacgaagcatatggtagtcaattcgaagatatagaaattgaaatggatcgtcgcaattctgctattccattaaaagacttaacaaatacgaatgcacgaattgaaccaggtgcgtttattagagaacaagccattattgaagatggtgctgtcgttatgatgggcgcaacaattaatattggcgcagtcgttggcgaaggtacaatgattgatatgaatgctactctcggtggtcgtgctacaactggtaaaaatgtacatgtaggggctggcgcagtattagcaggtgtgattgaaccccctagtgcttcaccggttataatcgaggatgatgtattaatcggtgcaaatgcagttattttagaaggtgtacgtgttggtaaaggtgctattgttgcagctggcgcgattgtgacacaagatgtaccagctggtgcagttgttgctggtacacctgcaaaagtgattaagcaagcttctgaagtacaagatactaaaaaagagattgtagcagcattaagaaaactgaatgactagtgacgtcaacgtataataatttcaaggttgagatacgattatgtctcaaccttattgtttagcattgaataaacttatgatcacaaatttcgaaatacgttacactatttatatagtaatttaacacaaaggattgataattatgaatgaattagaatttgttacgaaacatcgccgtcatttacatcaacatcctgaattaagcttacatgaatttgaaacaactgcttatattaaagcgtttttagatagtttaaatattaaatacgattgcccattggaaactggcgtcattgcatacttagaaggtaatggctcacatacgatagcgtatagagctgatattgatgcgttacctattttagaggaaaatgatgtgccttatcgcagtcaatctgatcatgtgatgcatgcttgtggacatgatggtcatacaactgcattaatgctttttgtacaacgttgcaaagacatgcaagatgcaggtcaattaccgcaaaatgtcgttttcattttccaacctgcagaagaaactggtggcggtgcaaatcgattaataaaagccggtgcctttgataagtatccaattgaagcggtatttggtattcatgttaacccatttgctgatgaaggcattgcagtgataagagatgaagaaattacggccagcgcaacagagtatcgctttttcttaacaggcctgtcaagtcatgttgctgataaagaacaaggtcattcttgtggtgaagcattacaacatgtattaactcaaatatcacaaattcaacaatttcaccttaacggtttgaaacgaaatattgttcatattggtcattttaaagctggtgaagcgattaacactgtaccaagtaatggctatttagaaggtactattcgtacatatgatattgatgatttaacaatcgttaaaaatcaaatgcacaagatagcagaaagtgtcaagcttctgtttaatgtagattgtgaagttaaatttgcagaaggttatccccctacaatcaatagtccgaaattacgtactcaaatagaggacgccttaataaaagctgatttaaatgtctatgacaaaccaacgccattcttatttggggaagattttagtttttatggtcaacaactagctccagcttactttgtttttataggaacacgaaatgaagat

SEQ ID NO: 12 - DNA, 2692570 bp, Staphylococcus aureus subsp. aureus VC40 (residues 1,346,286-2,692,570 of 2,692,570)
aaaggttttgtaactggtttgcacacatcacatttaaattttgatgaaaaagtgttaataaacgtggttaatttttacgaaaatttattaaataattacaaagaggtgtaatacattgacagcaacatggtctgtaaataagaaaatatttttacaaaatgcaatcacagtcaaaaacaatcagccattaatggcagttgttaaaaataatgcatatcactatgacctagaatttgctgtaactcagtttatccatgcaggtatagatacatttagcacaacatcactacgagaagcaattcaaattagacaacttgctccagatgcaacaatctttttaatgaatgcagtttacgagtttgatttagtccgtgaacatcaaatacacatgactttgccgtcgttgacatattactataaccataaaaatgatttagctggtattcatgttcacttagaatttgaaaatttattacatcggtctggatttaaagatttaaacgaaattaaagaagtattgaaagatcaccatcataatcaaaatgcaaaaatgattattagtggtttatggacccattttggatatgctgatgaattcgatgtgtcagattataatgttgaacgttcacaatggatggaaattgttgaagcacttttatctgaaggttatcagttcgacctaatccatgctcaaaatagtgcgagtttttatcgggaaggacaaatattactaccccaccatacacatgcgcgtgtaggtattgcgttatacggttcaagaccatatagttcactgaatcaacatgatatagttcagtcattaactttaaaagcacatgttattcaagtgcgcgaagtacaagctggtgattattgcggttatagctttgcctttgaagtgactaaaaacaatacaaaattagctgtagttgatatcggttatggcgatggaattttaagaactcgtgctaaacatgaagcacttatcaatggtaaacgctacccgatacgtgcattaatgatgagccatatgtttgttgaagtagatggcaatgtacatgcacaagatgaagttattctttataataatgatatccgcatcgatgaatatacctttaaaggtgttggtgcaaattctgaacaattaagtgctatgaatcatgattctttaaaaaaggagtacatttcaaatgactgttaaatataatcaaaatggcgaattaacaatggatggtattagtttaaaaacgattgcacaaagctttggtacacctaccattgtttatgatgaactacaaattagagaacagatgcgccgttaccatcgcgcatttaaagatagtggattaaaatacaatatttcatacgcctcaaaggcatttacttgcattcaaatggtcaaacttgtagctgaggaagatttacagttagatgttgtttctgaaggtgaattatatacagctttagaagcaggttttgaaccgagtcgcatccatttccatggtaacaataaaacgaaacatgaaattaggtatgctttagaaaataatatcggttattttgttatagattcattagaagaaattgaattaatagaccgctatgctaatgatacggttcaagttgtattacgagttaatccaggtgttgaagcacatacacacgaatttattcaaactgggcaagaagatagtaagtttggattatcaattcaatatggcttagctaaaaaagcaattgacaaagtccaacaatctaaacacttaaaattaaaaggtgtacattgtcatattggttcacagattgaaggtacagaagcatttattgaaactgctaaaattgttttacgttggcttaaagagcaaggcattcaagttgaattattaaaccttggtggtggctttggtattaaatatgttgaaggtgacgaaagtttccctatcgaaagtggtattaaagatattacagacgcaataaaatccgaaattaaagttctaggtatagatgcaccagaaataggtattgaaccgggacgatcaattgtaggtgaagctggcgttactttatatgaagttggaaccattaaagaaattccagagattaataaatatgtttcaatcgatggcggtatgagtgatcatatcagaactgcactttatgacgcaaagtatcaagcattgcttgttaatagaaatgaagaagcagatgacagtgtaactatagctggaaaattatgtgagtctggtgatatcattattaaagacgctaaattaccttcatcagtcaaacgtggagactatcttgctatattatcaactggtgcatatcattactctatggcatccaattacaatcaaatgcaaaagccttctgtgtttttcttaaaagatggcaaagcacgtgaagttataaagcgacaatcgttaagacaactcattattaatgatacaaaataaaaataaacaaagtaatccccgaagcacagaaaattatactgtgactcggggaatttttatgcattatagatgactgtagaaaacatgcttggacatatactctaaaaaaggaagaacagcacatttttagttagaaagtatttatttctttttgtcattaatcctttatatttagttagccctattcaactaatttaaagcatcatatacataccacactttaaacaagcatcatgaaattagattttatgctttacttgctttttcaaataatataaaacgataagaattaacaacaaatataatgtataaaacagaatttcatcaaatccaaaatctttacttgtaattaatacatcaatatcttctaattccatcatctctgctttaatataattattaaactttggcaaagtcattaaatgtacattgtaaatatagtaataaaagtcgataaatatgatgttaaaaaatatgtatgttttatcaatattagttttgaaaaatagtatcccagaaatcattatcggaatcactaatacaatcatcattgctgctaaaatattaatatttaatccaattgcagataatacaccgaaaactaataaattagcaactaaactaaggataagatatttcataaaatcacctcgtcgttgtacaccataattatattatataaatatatttttctattgcaaacaatgttggtgatataaaaaaagagttctcaatttggttgagaaactcatcgcgttaagtatttgtaataagcatataaaaacaccttacttcttggtaaggtgttagttaaaatcaatgattcaaatctaagaattatagtttaacaacgtttgcagcttgtggaccgcggtcgccttcaactacttcaaactcaacagcttgaccttcttctaatgatttgtaaccatcttggttaattgctgaaaaatgtacgaatacgtcattttctccttcaacttcgataaagccgaatcctttttcagcgttaaaccatttaactgtaccttgtttcataatctgaaacctccaagactaaaattcattcaatatgcttattcgcatattacaaaaaatacatgcaaatttcactcaaatattctttgcaatatggaataatcatctgcttaacttgtattatagtgcagttattaccaaattgtaatacaataataaaaaatattcatttaatcaattattggtagtttataatatacttcattattttgtaaaacaatgaaactataaaatatttgtaaatcctcttcacaatcttcgcaatagttcatgtcacaattattataaaatgcataaatattatatttgcctgtgacatagttatcgaactgaactttacattgattaatcaattgttgatagtgcttaaacatgtcatcaaaatcttgatattgatatttttcaacaatgttttctggccagtcactgaataaccaccatccctcataatcggctctaattttggtaactgtccacattattaaagaccccttccatacttcaaaaactctatacttatttttatacctttatcctctgaaaatcaagtttgacgacttgaaacaaacaaagtagtaactatagtaattattagtttttttaagtaaaactacgtataataacattatgaggtggtaaaaatgagacatatacatttacaagtattcggacgcgttcaaggcgtcggatttagatattttacacaacgcattgcaatgaactataacattgtcggtactgttcaaaatgtagatgactatgtagagatatatgcacaaggggatgacgcagatatagagagatttattcaaggtgtaattgaaggtgcctcaccagcatcaaatgtaacaagccatcaacttgaagagttagaactaaatcaaaaattatcggattttcgatcaatataaaatgctaaataaaggaagatgacagtgagatataatatttctcatatatttggggtgttagtgggaattcctgtagcgtttttaacaagcatatttgggatgattgcacttgatgtatcttttttaattgatatgtctattggtattgttggctttttaatgacatacctaccgatacaaaaactcacttcacgcaaatatttaaacgaaattggtttgactagaaaagactatcgctatattcgaaatcagttaaatcatacacaccaaaaacttagaggtattttaaaaacgtatgtcaatataagatcaattaaagattttaggcagattaatgatatataccaaatttcacgttctatttatacgacagttagacagagacctgcatcattttataaagttgaaggctttttttattctcatattgataatgctttaaatttggttgatgcatatacacgtctagcaaaaatgcccaaaaaatcaattaatgaacagcaaaagttagaacaaacacgaattactttggatgaggtcaaacgaacattaatcgctgatttaaagcgtctcaacgaagatgattatgaacgtttagatattgaaatggaattaaataagttacatcaaaaacatcatcaagattgatgtaaaatagcaactattggagagatgattgatgactgaaaataaaagtttcaaagaaagccatccactagatgattttataagcgataaagaattatcgaatactactattcaaaaagaaaagttaacaattgaacaacaaaaacaggtagacacaatcagtaaacaaattaaccctttagacaatgaaggtttattagcgtttggttctgatttacagaaacaaatgtctcaattttcacatcaaatgttggatgaagtacaaagtaaagatgttggtcctattggagatactttgtcagatctaatgtcaaaactaaagtcagttaatccaaatgagttaaatactgataaaccatctatgttaaaaagaatttttagcagagcaaagtcgtctatcaatgaaatcttttcaagaatgcaatcagttagtgctcaagtcgatcgcataacgattcaactgcagaaacatcaaacacatttaacaagagatattgaattattagatacgctatatgataaaaacaaacaatactttgatgacttatcattgcatatcattgctgcacagcaaaaaaagttgcaattagaaaatgaaaagctaccacaattgcaacagcaagcgcagcaatccactaatcaaatggatattcaacaagttgcagatatgcagcaatttatagatagactagataaacgcatatatgacttacagctttcaagacaaatagctttgcaaactgcgccacaaattcgtatgattcaaaatgttaatcaagcacttgccgagaagatacaaagttcaattttgacaagtattccactatggaaaaatcaaatggccattgcgcttacattaatgagacagcgtaatgcagttgctgcacaacgagctgtcactgatacaactaatgatttattaacagcaaatgctgaaatgttgaaacaaaatgcgattgaaactgcaacagaaaatgagcgtggcattgttgatcttgatacattgaaacgtacacagcgtaacattattgagacaattgaagaaacattaattattcaacaacacggtcgcgaagaacgacaattagctgaaaaagaattacaacaattagaacaagatttaaagtcacatttagtgaacatcaaaggaccgaataaacaatcataaattacgaattagatataacaaaaaagagcttgggacattaagttccttaaagttcttaggcaatgtaaaaaagctgatttctattatttatttgatagaaatcagcttttttgatatgtattttataatgtacagctcgttgagctgctattttccttatattaagtgccattaatacaaaacctagctctcgtttaactttatttattcccgaactgacattcgagtgaaacccaaaatagccttcataaatccaaaaacaggctctacatcaatttttctttgactatagattttttcgtttctggttcagaaagcttttgattaatttgggctttaaagtattcccaattataattcttcataattttcttattggatttcgaatttggcttcatgcattgatgtctcaaagaacatgatgaacagtcatcacattcatatagcttgaagtcacgtttaaaactatatctatcattacggtatgcatatcttttaaaacctattcttttgttattaggacatataaattcatcgaattcgctatcagatatcgtttcaacaatttcattaacatatcgcgtattatcattttgaggaattctaacagaagtttctattggtagtgtaagttgggtcatgttataatttttatacataaggcacctcgttaatttagtttagtagtatttattaaattatacgaagggatccaacacagaaaatttattttattgaattttacatttatgtgcaagttgggcaaagtgtcttatttttttaaagtatttcaaagtaaaattacacgttaatacgtagtattaatggcgagactcctgagggagcagtgccagtcgaagaccgaggctgagacggcaccctaggaaagcgaagccattcaatacgaagtattgtataaatagagaacagcagtaagatattttctaattgaaaattatcttactgctgtttttttagggatttatgtcccaacctcttttatattattcgttattcctgttgatatttaattggatcttgttttacaaatatgccgactagatagcctaatatcgttgcaataattgctactgggaaccactctaaagaatacgctcttagaggcaatgattctataaagttaattttcagccaacctaacttactaataacactgaaaatcgacaatataaatacgataataactggaatttgttgtgaaatgcgttttgtcggtatgaatttggcaattaaaattaataatacaacagttattgctactgggtatacaatgcttaataccggaattgacattgagataacagcatttaaaccttggttagcaataataaaactcattaaaatgaaaactaatacaaatgctttgtatgatactttaggtacgattctatggaaatattcagaaactgcaacaataagcccgcatgctgtagttagacatgccagcgccacaatgatgcccaataaatattttccgaatgaaccaaatcctgttgaagccattgtcgttaataaatatgtcccaatgtttcgatctttggatttcaattgatctaacgtcatgtcacttactggcatatgattaccaatataacctaatgaaatatatatgaaaattaaagctacggctgcaattaaaccagcagtcaaagtttgtttgaatatttgatttgttttagtaatgcctgttagttttactgcattaacaacaatcattgaaaaagcaattgctgcaatggcatccattgttaaatagccttgtgtaaagccttcagcaaaacttgaaaaattagaatgatatagtgcttcattgccctttccagcactattaccgctaaagtctaagtatcctttaataatcatcgctaaaatagtaatcaataataatggtgttaataatgaaccaatacgatcgattaacttagatggatttaaacaaatatacaaaacgactatgaagtagataatcgtaaatataaataaagcgatactactattgctatgtataattggtgtaattgtcatttcaaaagatgtagatgcagttctaggtattgcaaaaagtggtcctatagtcaaataaatgatgattaagaacaatattgaaaatttaggtgaaattttatttaatgcgccaatatatccttctttatcaagtgcacctacaatcacacctaataatggtaaaccaatcccagttagaacaaacgctaaaatggcgggccagaaaaattgaccactatccaatccgagattaggaggaaaaattagattgcctgcgccaaaaaacatagcgaagagcgtaaacccaatgacccatgtatttttattcatagagttactcctttttttaaaacacgaaataatttacaagtaaatattttagcacaaaaaataataaagagtctatatgaaatatgttgtacatagcagaaacaaaacacatgtgttgtttaaatcaaattatgtcagaaaataaaattcttcaaatccactttttaaatagtaactgatgacttttattcacaatttcatataaactcatattttaaatttatttataaagatttaagtagtaatttttttaataatggagagagatgtccaggtaaatgcgcaacaccttcaacgaaaatagcatattgaccataaatattatgaattgtttgttcaacatcttcagttattggatcttgactcaaaaatacattaaatacttcaataccaaatttacgtgacatttctacagcttcatacgtatcaataataccatcttgactataattaaatgcagacggttcgccgtctgaaaatacgattaaaaatcgttgatgttgatttcgacgcattaatcgttcacttgcaactctaatagcaacaccatcacgattatcatcttgaggttcaagtgccataatacgtgggccatctttttcaaaggttgagtaatcatagttaataatttcattaatgatatttggttgtgcatgctcgtctgaatcaaaggcatcctcactgaatgataaaatttcatgtttaatgttcaatgcttttaacgtctcgtggaataacactacacctttcttcgtttcagccattttatcatgcatacttgctgacgcatcaattaacaatgtaaatgtcgcatcaaatgatttacttaaatcttgttttttgtaaaacaatttatattgatcgtcgataaaccaattaattaaatccttttgtaatcgcccttttgttaaattaaaacgtgcatctcgttgttctcgttcaatcgttttctttataatttgaattaagtctttgatttcatattgtacgtcttgtttcgattcttgatattctaaaacatattgtggctcaatttcaggaatttgccattttatttctacatttttgttcacaccatcaagttgaaatgcttggctttgaccaacagcatcgccttcttcacgatttagcgtatcgtttgatcctttgccctttttggtcatcatatcagtcatatcatctgtagcatcgccttcacgtgcttcatcattacctaatgtttcactattttgtccttcgtgaagctccatttctaaataggcgccaccttttgactcactatctgcagatttagagtcagctttttcactttcgttatcatcatcttctgaagtatcatcttgcccatcgacttgacttgcatcagttctctttaaatcatcaaactctggactagctaatgtattatatagtgttttaggtaagtaataatattcgtttagcatatcttcttttaaaatatcatctacttgatacataattctttgagccagatacatattatcttcagaattttgattttggaaaaaattaggtaaatataagaacatatttactaaaatatcatctaaatctgaatgtatagatggtatatcaaagaaatcttggcttaaaaatgcatgttctaaatacaaaaataataaatctgtatattgtgttttagtacgatacactttaatttgagattccgtatatgatatacgtgtatctaagcgaagatcaattaatttagcagtacttgggcgctcaactttaatagaatttaatacgcgcatatcttctaataatttaaaaagttgttgataaaatttagggtgtttaaaagttttatcttgtactacttcatttacaatttgtacatccatcatatgataaccgtaagcagctaacataacatctgtttttaaaccagccatttcgatatggcttggtcgatgtgaccaaaaccaactcgtaatcaaaacattttgaacaggattatagtaagggaatttttggattttaacttgtgtttgttcattttttaataagagtcgagctaagtcttgcaacatcattacttgcttggcatctaactgttcgtcattaaattttatgaaacgatcactcatgttttatccctctttaaaagtttagttctacagcattatatattgcttgttgttcacgttcatcttccaatttatcaataattgtacgtttaattgcacgttcaactggcattacagtgattaaatcacacaagtctaataatgcacggatactagcggcttcttcagaaatttgtccctgcttagacatagtacgtaaatcttcattaaacttaataatttgttcgatttgtttatcatcttgtaataaactttgctctttaatcacattttttaaaatgtccccatcaatataatcaacgtgaataacaacaaagcgattttttagtgcttcattcattggcaaagtaccaacataaccttcatttatcgctgctataacgttaaatcctggtacagctttgattacttcaccagtgtatggattcgtaatttgacgacgataatctaagaccccatttaatacaggcaatgtttcaggtttagccatatttatttcatcaatatataaaatatgcccctctttcatagctttaataactggaccatctacaaagacaatttcttgttgaccttccgcatttgttttaattgttttaaagcctaataagctttctgtatctaaatcaacagaacaattgacttgatgcatgggtgtatcaacaacttcacttaatgtttctgccaactttgttttccctgaacctgttggacctttaagtaaaatatttttatttaaatcaaataatgccttcgcatcattgaaaactgttgaatctgaattcttataatgttttagtgccattttaaaacgttctcctttaaataaattaaaaaactaagacatggaataagttctccaaatgccttagtttactattctattctgatataaaacgcaatgcttagtatgcgaattgtttatattttaccaaatttactaattgaaaatctcatattaggcttcatttcaataattatgcgtttaaacttctttgaaatatgttttatagtaaccgccaactaatccagaattatctattatttgataatattcttcagtttcgttgataacatcatattgtttgccaaccgttaacatgtcagaaactgtaaatttctttgcatctgtattaatgacttctactttcttgattggtgtacgttctttccaagtttcatgtaacataaattttgtcctcgctatcgtaaaaaaattatttttgtaaagtgaatataaacgataatccactgttttcagtaattctaattgattcaatatcatcttgctcaagcgtttgatatggtatttccacttcatctaagcgcgatttcgcttgattaaagaaatctgcatctttcgtttcaaactcaacttgatcgactgcgccatattccggcattgtcatttcggtttctacaggcattaaatgtatttcgccacctagaccacccgttccaactttgaatacttggacatgatagtcagcattgtcgaagggttggtattctgcaaatacttcaagtccgaatatatttgttaaaatttgacctgtaatatctacatgattcactttaagaatcactggtcctaaaccttgcacttgatgtaacggattgaccgcactctcaaaagaaggcatacctaaaccaacgccataattattctcgtttgaatatattgagaaaatatgaccattgttatcttcgagactgaaatatttattgccatttaattctttaactgttgtaaatggaatatccttattcgataatatttccgcatactcctctaaacctgagtcagttggtgtacgtaatccaatacccacaaagtgagattcttctaattgctcacttggaacttgtataaattgaagtcttgttcctgggcttatatctgcatcgccgaaacgaattgagttttcaagaagttcttcataatttaatcctaatatgtcaaccatgaaatgttttgtctgttctatatttgttgtacctaatgttatacttctaagtccacacattatagccacctctatctttatctttactattatattataacttattttaatcataaattatagaatatcggtcagttgattttgattatagattaatatgtgaaaaatgtatttctttaaaagaactatttcatttaaataggtaacataatattgttatggttgctattgagtgtgtcattaatgaatatctgtatatagcaattgaatatttcgttttttgtaggacatgaaaaacatatatatgtcgtgtccataaagcgaatttacatcatgttcagatgattttaaattaactaaaggcgcttatagaattcatatatttcatcgtttgttattatctaaaatgcattcattagcatattgaaacacgctattctacctatatttctattgtgagtctatttcaatagaaatgatatattttttaagtagtcaaaattaaacccacattttaatacgaatcattataaaaataaagtacagcagtaagatatttcgactaggaaataatcttactgctgtttgttattgatttaatcccgcttttaggaatagtaaactattttgtgttgtggattaagattctaataataagtcttctgggttttcaattaattctttaattgtttttaagaatccaactgcttctttaccgtcaataattctatgatcatagcttaatgcaatatacatcattggacgattttcgattgtatcttgatcaatcgcaattggtcttgtaataattgaatgcatgcctaagattgcagcttgattaccattgataattggcgtactcatcattgatccaaaaataccgccatttgtaatcgtaaatgaaccattaaccatatcatctaagccaagttttttctctcgtgctttaactgctaaattagcaatttctgcttcgatttctgcaaaattctttttatcacaatctcttacaaatggtactaataatccatcatctgtagaaacagctacaccaatatcataatattgtttcgtaatcatgtcgtcgccgtcgatttctgcattaacttctggatactttttcaaagctgctacagaagctttagtaaagaatgacataaatcctaatttagtaccatcatgatctttcataaattgttctttcttacgtttacgcaattccataacatttgtcatgtcaacttcgttaaatgttgttaacatagctgtattattagatacctctaataattttttggcagctgttttctttctacgtgacattttttcacgaatcactggttttgtaggatattgattgtattttttctcttcttttgcagatgcttgttgtgttgtttgtgttgatgccggtgcctgttgtttcttatcaatatcttctttacgaaccacatcatttgttttcggacttacttcagcaagattcacaccattttcacgagcatatcgacgcgcagaaggcgtagcattaatacgttgctgattgtcatcatttgcttgatttacttcagctttatctaccgaattatttgttgtttcttcttttttattatttgtttcttcattttgttgtggagtattgtcgttactattttctttagaagcattgccactaccttcgccgatgatagcaattgcttgtccaacttctacagtgtcgccttcacttgcaagttgttcagataatacacctgcttcttcagatacaacttcgacattaactttatcagtttctaattcaagaatagcttcacctttttctacgctatcccctacgtttttcaaccattctgcaatggtaccttctgtaatagattctgctaattctggaactttaacctctggcatgacttatttccccctagttattttttaatgcattttctataattttattttgaacaagtttatgaatttctccatcgccttcagctggagcagccctttgaattctgccatgataacttaaatcatatttatctgcaactagcactttaacatatggatagacatataaccatgcaccttgatttttaggttcttcttgtacccatgacacttcttcaaggtttggcaattgtgctagtaatgcttcaatctcttcctctgggaatggatacaatctttcaatcgcaacgagtaatactgattcgtctggatttttagctaatgcttcttttaaatcaatgaacattttaccagttgccaaaataacttttgtaaccttatccgcttgatatgattctgtcaaaattggctcaaatccaccagaagtaaattcatcaattggttttgcaactgttttatttctcagtaagctttttggtgacataacaaccaatggtcgcatttgttcagaatctaaactagccgcttgtgcacgcaataagtggaaataattacttgaactagataagttgacaactgtgcaattattttcagcagctaattgtaaaaatcgctctaatcttgctgatgaatgttcaggcccttgaccctcatatgcatgaggtaagaataatgttaatcctgaacgttctccccattttgagcgagaactgaataagaagttgtcaaaaatcatttgtgacatatttgcaaaatcaccatattgtgcttcccaaatattgaagctttttttgttttccacattatagccgtattcaaaaccaactactgctgcttctgaaagcggagaattgtgtatatcaaatgtcgctttttgatcaggaacatgatgtaaaggtgtatatgtttcacctgtttgctcatcatgtaacacggcatgcctatgactgaatgtaccacgttcactatcttgaccagttaagcgaatcggtgtaccatcttgtaaaattgtcgcaaatgcaagttgttctgcttgtgcccaattaactaaaccatcttctttattaaacggctcatgacgcttctcaagaactttgtttaactttttcaaaatgttaaagccatccggatatgttaacaatgcatcatttatttctttcaagtgatcaaaagtaaatgattgttcgtctgcttgtaacggtaatgcaagatctgcaggcttttccatatctggattatccattttatcagctttattaattttatcatgagcttgtcttagttccttttggacttgttctataaatgaatgcatttcatcttctgaaatgacaccttcattaacaagctttttaccaaacacatattcaacagagtcatgtttgcgaatattctgataaggaactggattagtaattgatggttcatccatttcgttatgtccgaaacgacgataacctactaaatcaataacgacgtctttatgaaactcttttctaaattccattgcaatatcaattgcttcaatagtagcttcaacgtcatctgcattgacatggaatattggcacatcataacctttggccacatctgtagaataagttgttgaacgtgcatcaattggttctgtagtaaatccaattctattgttagtaataatatgcaatgaaccacccgtagaatagcctttcaagtttcctaagttcattgtttcgaagttaattccttgaccaggataagcagcatcgccatgtataataattggcattgctttatgatgatcagtcgtcggagccccagctcgttgtgtatcatcttgtgctgctctcgtacgcccctcaacaacaggtgcaacaatttccaagtgacttggattgttagccagtgcaatacgctgcattgtaccgtatgaatcagtagttttaatgccaccaaggtgatatttcacatcaccagtccatccagcagttaactgcaagctaccatcttcaggtaagaatttcattggatctgtatgcataaattctgaaatcatcatttcgtacggtttttctaagacatgcgttaaaacgtttaaacgtccacggtgagccatgcctatttgtatatttttaataccttctttcgcagcaatcgtaatagtacgttgtaacatcggtacaagtgcgtctaccccttcaattgaaaaacgctttgcaccaacgaagtttttatgaagatatttttcaaacccttcaacatacgctaattgtttgaatagtgcccttttttcgttattatttaacgttactttatatggcgtttcaattcttctttttaaccaaccacgttcggtattgttattaatatgtgtatactcaaatgcaattggtcctttgtaacgtttttccattcttaaaattgcttcataagcattatcataaatgtcggcaaagtgatctgaaacaattcctgctgatataccttccaaagtctgttgatctaaatcaaagtcttcaatctctaatttaggtacatgtttcctttttggaggatttacaggataaatatcggctttaagatgcccgtattggcgaatattatcaattaaacgcatgacacgcttaattgtgccgtcgctattttgactacttgtactttttaaagctggtacaattgagtcatcattcttaattgtgctgaataagacttgtaaatcttctggtacagatgatggatcttgtaaaaagtcatcatatagatctaacattagacctaaattcgcaccgaagtttacaggagcctctgaaacttcttttctttcgttagtcattttacaccctccacaaaaatgttgaaacgcttacaatgtaataatatcactatttagttatttgttaaagtagatttacctatttatctgctaaaaagaagaatcaacaaaagcgttgattcttctaggtttatagatgtattttattgtaaattttgggagtacaacagaaatgataaagaaccactgtttatttgttttatagttgttcttatacattagtcacagctaatgtgtacttaaaaaattgatcctatgactttgattgacgtctcagtcatgattaaaatatgattttaaacgttgttcctttgttaatttcacttttaattttaatcgatcctccgtttaattgaatgattttttgagcaatagataatccgagtccattaccgccttgacttcttgaacgagatttatccactcgataaaagcgatcaaaaatgaaatcttgatcttcctctggaataccaattccatgatctgtaatttcaattattttttgcttattttttaaccttgtcttaactttaattttcttattcttcacatcatatttgattgcattatcaataaagattaaaaataattgttcgaattgatgaggtttcattttaatttctagatttttagatgtcagatccgtatcaaattgataatcaggatgcaattgttttaatgagtgtattcgcgagcgaatttcatcattaatatgcacggtctgtgcttcagaagaaatgtcatttacatctcctttagtcaattcaagtaattcttcgactaattttatgatacgattcatttcttcaatagaaatatttaacgattcttctaatactgctgggtctttttttccccatcgctgaatcaaatttaaatgaccttgaataatttgtaatggtgttcgtaattcatgtgacgcatcttcaacaaattgtctttgttgattaaatgattcttcaatttggctcatcatctcattaaacgtatttgctaaattatctatttcttcataatttgtatttaattgcaatttattttgaaaaccatctcgtcgaatctcaatcattttatttgataaactgacaagcggtttagtaatttgtgttgaaaatacataactgattgtggcagttataattgttgcaatcactccaaatgccagcgcaatgatatacaatgattttacgatgttatcataattttctagtgaatgaattaacaagctataccctttgaaatcttgcgttgtaattggttctttaataattaaatattcaatgcctttatagcgtttttttattacgcggtcaaaataacggtgttcataacctggttcaactctcactgtgttatcattcgatgtctcaaataatttattattatgctcatcataaataattatctcttgaaaattacctaaagatgcattcaagtctaatgcagatatatctttaacaggcttagaatgaaataaattattaatatcgcttgagcttcgttctgcatcatcaagctcactattatgcagtgtatctttcaagaaaaaaataataattaaacaaaacaaaaatatcgtgacaaacgtaatcatcgtggtaacaataatccagttattgcgcaatttacgttttgtcatcgtatcacatacccaacgccacgaactgtttcaatcattttgtcacgatcgtatggttttaacttgtttcgtaaatatcttatataaacatctacgacatttgtttctacttcactattataaccccatacatgatttaaaatttgttcccgttgcataacatggtttttattttcagctagaagatatagtaaatcatactctgtttttgttaattcaatttctgcgccatttaccgtcactttaaaagcgttcttatcaattgtaataccgttgacatcgataatatccttttgtggctgacgacgtaaaattgcacgaattcttgctaaaagttcttcaatatcaaacggcttaactatataatcgtctgcaccgtaatcaagcccagcaactttgtcatacgtatcacttttcgctgtaattataatgataggtgtagattgttgttgtctaattttgcgacaaatttctaagccattaattgacggcaacattaaatctaatatgattaaatcatagtaatggctaagcgctttatctaaaccgtcttgtccatcatactctgtgtccacattgtaattttcatgtgtgagttccaattcaagaaatcttgctaagttttgttcatcttctactattaaaatttgcgtcatttgtacacctcatattacgactttttctaataaggtaatatattttaaattttgtatttttctatacaatagttgctttttaaattagtttgtttacgtttaaattttatcacaaatcaataaccatgttttaaatttttcaagctacaatcattaattatttattaactcaaatatttaataatcagttaatggcattctgttaattctgattgcagtacttaaatatagaatactgtaacacaaggccttaccgcaatattaattgttgtcatatactgacttttcactattgtaaaatgaatagttattatctttattttcacaaaatgaccgtagtttaaacatttcacacatcatttcaatgtgcgattttgaacttggaagtaacatttcataatgtatgaattcaaaaggagtatgtaaacaatataatgtttaaacctcatcacttttaaatattctaattctaatgagaaatacaaatttttttattttctaaaatagcgtaatcatgcgttttatttactattcttaaaaaatattcaaaaaaagttttagtttctaattgacaatgattctcactaatgtataatagtagttgaaaatgattatcaataccacatagaacatcccccccacaacgtttcgttcttgttggattggtcattttcaaatattccccttttatatgcccgtaaaagacaatatacgttataacaacgttttataaaagcagtaaacccttacgacactttaggtttactgcttttgtttttttactatttaatttattaatttatttctaagtaataacgttgataaaataatgcaaaataatccaccaataatgccggcaataatatctgttggataatgtacacctagatatacacgtgatatggaaatcaataaaatcatagctgcacataaccctataagaataccttttgaattaccttgatttaatcgatttaatagatagataccacttccaaaatatgcagttgatcccatagcatgaccgctaggaaaactaaatcctgttatatcaattaaacgcagcaatgtaggtctttctctatcgaatatattttttaatgctggattcaaaattccagataatgccattgttaatgcaaaaaataatgcttcaattttgtggcgctttaacatgagatatgccacaagaagtaatgaaatacataacattgcccagacttcacctactttagtagccccaagcatgatagatgtcgtaataaagctctctgatgaatatacaaactcataaacttcattatcaatccatttcccaagtcttgattcgtggaaaaacgcgataattccaaaaaccaatgtaaaaacgatgagcaaagagatacgtttccattgactcataaagcattaccccccattaattcaatgcgtctttaatcatcttatcaaataaagcttctttcgtataactttgttcatacgatttcatattattgataattcgagttctttcctgttccatttcatttagttcttgtaataaaatttgtgctgttaattgttcttcatcaatcgctttagcatatcctttatcagcaaaatgatttgcattgtcaatttggtcgcctcgggattgatctaaacctaatggtactaataacattggtatacgtaatgttaagaactcataaatcgcatttgatccagctctacttattactgtatccgtaattgctaataaatctgttaaatcctctttaacaaattcatattgtatatatcctgattttttaacttgagcatcttttaatcctttaccagttaaatgtatcacttgatattgttgtaataatgcatctaagttttcgcgaataatgctatttaattttttacttcctaagcttccacccataacgagtaaaacttttttattttcattaaagcctgttaattgataaccattatgtgcattaccattttttaaatcttctcgaattgttgctccaataaaatcagctttctctttaggtaagtagtttagcgtttcttcaaatgttgtatatattttcttggcaaatttaagtgctatcttattcgctaatcctggtgttaagtcagattcatgaataatagttggtatatttaatgatttggctgcaataacaacaggcacagatacaaatccaccttttgaaaataatagatcaggtttttcttttttcaaaactttacgagcatcaagaatacctttcaatactttaaatacgtctttggcattttctaaagaaatatatcttcttaatttaccactcgaaataggataatacttaatttctggtagttgtgattcaatcatttctctttcaataccatttttagaaccaatataaagcgcttcataaccttgtgataatgcagttggaattaaacttaaatttactgatacgtgtccaactgttccccctccggtaaatgcgattttcgtcattaatattacctctattcttttaaatttttataatatgcataaaatggttcacctttatcatatggcggatattccattaattgttcaccgaccttatgaaatccaaatttggcaaataaaccttgtgcaggtttgtttaacgcaaaggtgtccgttaaaataacttctgcaccacgtgctttaactacatcaataacataattgaataattctgtagcagctcctttatattctttcgaaccagttaatcgatgaataacaaaggcgccttctctatttactggccagtcaatgtcatcataccattctgcttggtcttggtcgacaacaataaagccataaattttgtcattttcctctaatacgtacaaataatctttagcaatatcttcttcaaaatgttctaaaagtgggtactgatcgtcccattgctcgttgtcgtgttctttcattaattcttttgcttcttctactagatttaagatttgatctaaatctgacattttacctagacggatcatgtacgtcactccttatatcattatgttaaacatgtttttcagtacatgttaatcttacacactattaacatgctttaaacctttattatgaatgaaaaatagtaattatcacactatgggataaaaataaccaataaaagtatcatataccaattaattgattgttaaaactagtgaataatactatttaaaaagtatatgctcattgcatattaaaccatgaattgttatcagcgatgatagaaattgcgttatttacatcatttgtaaatgtctaatttatatcttttagagttagacgtcaataaaaataaacacgcctcctaaattgctatctttgcaaatttaggaggcgtgtcattaacataataataatacaattttagtagtgtgtatcgcttattttaaaatattaatcaacttatcgagaacatcatcatgtttattagctttttcaactaataactcagtaaatttattattcgtttctttattaaattcaccagttacctcaagtttattcgcttgttggaaagctttaacttgattttctaaagctttatcaaattgcgttgattcattatcaactttataacctaaagctgataaaccaattttaatagttttaatatttttatcatcgtctccaactttaaatgttttcgtattaggaatgacatttaaagattgatatttaggtgtgtcaatagtaacgtctggtttaatgcctttaccgtgaatataatgaccatctggcgttaaccatttcatttcagtatattttaacaatgaaccatccttaaactctcttgtagtttgtacgacacctttgccgaatgtttttgacccataaactttagctttattatagtcttttagcgcaccagtaaacacttcagaagcgctagctgaaccttcattcactaagatggatatatccatgtctttcgcttcttttaacgcatcattagaagtttgaattgcttcagtatctttacctttttctagtttaacaacagtttttcctttatcgataaaaatatttgccattttaacagcttcatctagtagtccacctggattatttcttaaatctaaaacaatctttttcaaaccatctttgtgagcttttagaactgcatctttcaattcacctgatgtatcattctggaatttattaatagtaataactccaactttaccttttttcttatactcaacacttttaacatgaattttttcacgtttaatcttaacgtctttttcttcactacctcgttgaacagttaaagtgacttcagtgttttctttaccacgaacatctttgacaacttcatctaatgctttacctttaattgattttccatttactttagtaatgacatctttaggacgaatgccagcacgttctgctggagatcccttcataggactagtaaccataatttgatcatttttcttttgcatttctgcaccaatacctacaaaatcacctgaaacaccttcattaaaggatttcgtttgttcttttgttaaatattcagaataaggatcttttaattctttgaccatgccatcaattgcagctttacttaacttgtcagagtcctgttttttgtaataatcactatttaagattttatacacattttcaattttatttaagtttgcttgatcagttttgtttaaaccacttattttttgatttataaaaatatatgcaacaactgtgatgacagctgttattaggattgtaccaattaatattgatatgaattgccaacgttttaagtgaacgcgtttcgatgaattagtttcttggtcttgattgcttgttgcaatttcagcgcgttcatcatcggatgaagatgtgtgttgcttatcatccattgtatcacttccttattatgtattatgtacttttaaattctgtgtagttaatcatatcaatttatgcaagatagcgcaccatatttcactataattgattaatttttagtcacaacttagtttattttaaattaaaaccaggataacgaattgcatcaccctggttctaactattattattaaaaattatattaaaattttagccattccgtatattcttcatataaatcatcaaatacagacattggcaatgtgaaatcaccatgtgtctcaatataatcagacagtatgttaaaatcatcatcgtgttttgggaaagcaagatcgtcaaatatctcttctgctagacgacctttatcgtcgtgtcgaccacgaactgtcatgacaaattgataaaacgaatagtttttcattagttcattgtcacatcaatcacttttgtttcacctttaatcacagcattttcatcataaatattaattgaagctgcttgatcagtgttagtaattataattggtgaaattacagatttagcgttattattaatatattcaaggttgaatcttactaatggatctccgacgttaacttcgtcaccactagacactaacacttcaaatccttcaccgtctaattgaactgtgtctaaaccgatatgaactaataattctaatccgttatctgcttttaacccaatcgcatgcttagttggaaagacattgtcaacacgtcctgcaattggagacacaacttctccttcagttggattaataccaaaaccttcgcccatcattttttgtgcgaatacaggatctggaatatcttcaattttcacgaattctccagttaatggtgcataaattgcgatatctttctgaacttctttgccttttccgaataattttttaaacatactttccactcctacttatcaaaatgtgatattaaatcgccataacccaattcttctaacttttcatatggaataaattgaattgcagcggaattgatacagtatcttaagccgccactttctttaggtccatcattaaagacatgtcctaaatgactatttgattcttctgaacgcacttcagttctcaacataccaaatgatttgtcgactaattctataatttcatcgtcatcaagcgctttggaaaagctaggccatccacattcagaatgaaacttttcttcagatgtaaataaaggtttaccagaaattttatctacataaattcctttagcaaaatgattccaatattcattcataaatggtggttcagtgccgttttcttgtgtaacaatatattctatatctgttagttcacttttatcttttttaagcattttgattcccccaatgtgattctataaacgcttttctacctgaaccacgttgatattggtaataatgtaccgggttctttttgtaataatcttgatggtagtcttcagctggatagaaatttttatatggtttaataggtgtaatcactggtttcttgaaaataccttgttcatttaattgttgctttttaaactcagcagcctttttctgatgttcatcatgatagaaaatgactggttgatagctttcgcctctatcgaaaaattgcccttgatcatcagttgggtcaaatgttttgaaatatatgtctaatatattttcaaaggaagtaacctctggatcaaacgtaatttgtactgcttcgacatggccggtttgattcgtacatacctgttcataagttgggttgtcaacatgaccgccactataaccagatacgactgacttgatgcctggatatgatgtaaatggtttaaccatgcaccagaaacatcctcctgctaatgttgcatattcttttgtcatatgaattacctcctctatctatctaattataaatttagtctataaaggattgaaatggaagtaattaacactgaaaagattaaatttacttcttaaggactacgaggccaatcgcaccttgaccagtatgtgcagaaataactggtgtagttacatttatatcgtaattattcacatgaaaagcttcattaaaaactttcttcaatttatcaacatattcaatgacgttagcatgtgcgacaccaatggatttgatttcatgatctcctataaattcagcaatttcctttttcaagtattggatactagaattttgagttctcgcattgtgcacaagctctaagcgaccatcatctagtgtaccaattggtttaattttcataagattaccaatcaaaccttttgttttactaattctgccacctttaattaattgattcaattgccctataactacaaataatttaatgttttctcttaaatgatttaactttttaactatttcagaagttgagacaccttcttttacaagctctactaggtgttgtatttgataccctaaaccaaaagaaatagattttgaatcaataacagttacattagcatctaccatttgacttgcttggtaagcagtgttatatgtaccacttaatcctgaagaaagatgaatacttatgatttcagagccatcttttcctagttcttcataagcagatataaattcacctatggctggctgacttgtctttacatcttcatcattttcaatatgattaataaattcttctgatgtaatatctacttggtcaacgtatgaagctccttcaatagttaaacttaaaggaattacatgaatgttgtttgcttctaagtattctttagataaatcggatgttgagtctgttactataatctgttttgtcatggtcgttttcccccttattttttacgaattaaatgtagaaaggtatgtggaattgtatttttctcatctagtttaccttcaactgaagaggcaacttcccagtcttcaaatgtataaggtggaaagaacgtatcaccacggaatttaccttcaataacagtaatatacatgtcgtccactttatcaatcatttcttcaaataatgtttgccctccaaatatgaaaacatggcccggtagttggtaaatatcttcaatagagtgaattacatcaacgccctctacgttgaaacttgtatctgaagtaagtacaacatttcgacgattcggtagtggtttaccaatcgattcaaatgtcttacgacccattactaaagtatgacctgttgataattttttaacatgcttcaaatcatttggtaggtgccaaggtaattgattttcaaaaccaattactcgttgcaagtcatgtgcaactagaatggataaagtcataattatcctccttcttctatcatttcattttttattactaagttatctttaatttaacacaatttttatcataaagtgtgatagaaataatgattttgcataatttatgaaaacgtttaacacaaaaaagtacttttttgcacttgaaaatactatgatgtcattttgatgtctatatggttagctaactatgcaatgactacactgctattggagcttttattgctggatgtgattcatagtcaacaatttccaaatcttcataatttatgtcgaaaatagacttgtcactgttaatttttaatgttggaggattgaagctttcacgtgctaattgtgtttgaatcgcatcaatatgatttgaataaatatgtgcatctccaaatgtatgcacaaattcacccacttcaagtccacattctttggcaataaggtgtgtcaataaagcgtagcttgcgatattaaatggcacacctaaaaagatatctgcgctacgttggtataactggcaacttaacttaccatcttggacataaaactggaacatggtatgacaaggcggaagtgccattgtatcaatttctgttggattccatgcagatacgatgtgtcgccttgaatctggattatgcttaatttgttcaattactgttttaagttgatcaaaatgattaccatctttatcaacccaatctcgccattgtttaccataaacatttcctaaatccccgaattgcttcgcaaatgtatcatcttcaagaatacgttgcttaaattgtttcatttgttctttatattgttcgttaaattcaggatcactcaatgcacgatgcccgaaatctgtcatatctggacctttatactcgtctgatttgatataattttcaaaagcccattcgttccatatattattattatattttaataagtattggatgtttgtatctcctttaatgaaccataataattcggttgctactaatttaaaagaaactttctttgtcgttaatagtggaaatcctttagataagtcaaagcgaagttgatgaccaaatttcgaaatcgtacctgtatttgtgcgatcatttcgtgtatttcctatttctaaaacttcttcacaaagactgtgatatgctgcatcaaatgaattcaacatatgcgataacacctcattttcattatttatagtatgtatatttagtttgatataacttaactttatgtagcattttgttatcactcattttaggaatatgatattaatatcatgaattccgttactttatttataaaatgctgattaagtacctaccccatcgtaacgtgatatatgtttccaattggtaattgtttacccaaatctataactttaatgctaaaaaattttaaaaaagaggttaacacatgatttgaatattatgtttgatgtcctattaaaacagttaaatttctagaaaatatagttggtaaaaacggactttatttaacaaatagaatacaactatattctctattttcaatgacagacaccatttttaatattataaaatgtgttaacctttatatttatttatgtgtactatttacaattttcgtcaaaggcatcctttaagtccattgcaatgtcattaatatctctaccttcgataaattctctaggcataaaataaactaaatcttgacctttgaataaagcatacgaaggactagatggtgcttgctgaatgaattctcgcattgtagcagttgcttctttatcttgcccagcaaaaactgtaactgtatttgtaggtctatgttcattttgtgttgcaactgctactgcagctggtcttgctaatccagctgcacagccgcatgtagagttaataactacaaaagtagtgtcatcagcatttacttggttcatatactccgatactgcttcgctcgtttctaaacttgtaaaaccattttgagttaattcgccacgcatttgttgcgcaatttctttcatataagcatcatatgcattcatatttaattcctccaattaaattgttctgtttgccatttgtttccatactgaaccaagtgcttcatctccgttttcaatacgagatatggccatttcaatttgtaatttaacttcaaacgcattgtcattaatatgggcttttagtgcgggaagctgctctgcattaccttcatcaaagataaacatagcagcacgccacctaacgattttctgtggatcatctaatagtagcaccatttctggtagtgcctctggataccctaaatcgcttatgcaatcccctgctgttcttcttacagcaggacttttatcacgaagccccttatataaatacggtaaaatttctttactttcaatcatacctaataatacaatcgcttgacgtctaaccggtactttttcatcagataaagctaaatcaagcagcggtatatcttcaaaagtcggctttggaaaatggtttaacattcgtaatcgagtcttccaattatcagttgcatgatattcatccaaagagacatgtcgatagaaatgataattattagttgcgtgattttcttctaaagcatgttttaccaatacgggtaactgtgattctggataggtagctagcacttcttctaggacaccatccattacttcttgaatatttccatagcgatttcctaaatctagccatttacgcataaaaacaatattgtcatgtgctgtttgcgcttgagtcatatggtcaacatatgtttgtggtaattgttctcttaattcttggtcagcagaagttagcttaatttgatacggtatacccttaaaagttaataattcagctttaatttcaccaaaatgattgtcaatttgaggttcatttacagattctaaaaccttattcgcatcagaaaaagcagctttaatatcaggtaatatgacttcccaatcagcttttggtgccttatcaacagctaagaagttcatgacatgaaaaatggaagtgataccatctatagataacaactgatttataaatcttggttgtgtttcttctacttttttataagtattagataacttgtcttctcttgtatatgacaaaacaactttcattgtatttggacttggtgttggctctatacgtaaaatttccatatactttattccccccgaatactagttgatgaaaaatttattcgaatacagcctctacttttggcaatactgtttcccaatttgcgtcattttctttatctactgaaataaagtccataacatggaaaattgatttaacgccttcaacctttaagatgtcattaataaatgctggctgtgaatcatcaactttagtatacgtatctgatgtcataccttctctgctttcactaagtgtaatcttcattgtgttgtggttcggtgtttctgatatagatataattttcatttgacttcctcctattgaagttcatttcctaattgttttatttctttccctattgaacactcattgatacaaaaatgatgcgccttcgttttcccctctaatttacgcagacgagttttgattggacattgattgcaataagtattcattaaatcatctattttcgcgagtgcattttgctctgaaaaagttaaaatacgcgacacttcctttattacttcaaaatattgcaaccttgtaaataagtgttactgttttaaatttgacataaaaatattataacatttttgaccctaagatttgaatgaaaccttttataattctatacgtaaaatgtatttatattcaaatgctattgcatcgcaaacgatttttcagtaaaatgagttagttatttattgagcggtttctaaacacccgcatgatcaaaatttaggaggacattttaatatgtataatgaaattttaggactagttacgtttattgcaacgttcgtgcttatggtacttatgtatcgcttttttggtaaacaaggtttaattgcatgggttgcaattggcacaatcattgccaacatacaagtgattaaaactgtagaaatctttggtatttcagcaactttaggtaatgtcatgtttgcttctatttatttagcaacagatatattaaacgatatttatgggcgtagagttgcaaaaagagcagtttggttaggcttttcatcaacattaattatgattattgttatgcaattgtcattacattttattcctgcaccagaagatatggcacaaaaagcattacacgcaatctttgatgttgtgccacgcattgctttaggctcaatcgtcgcatatattattggtcaacatattgatgtatttatcttttcactaattaaaaaagtatttagttctgataaaacgtttttcatccgtgcatatggtagtacatttttaagctcaataattgatacagctttatttgtagctatcgcatttatcggaagtttacctggtacagttgtatttgaaatatttattacaacgtacgtattaaaattagcttcaacagttttcaatgtaccatttggatatattgctaaatcattttatcgtaaaggtaagattgataagttagatcaaggctattaacgcacttactacacaaaagaataagttttaagggagtgggacagaaataatattttcgcaaaatttatttcgtcgtcccaccccaacttgcattgtctgtagaaattgggaatccaatttctctttgttggggcccatcccaaacttgcacattattgtaagctgacttttcgtcatcttctgtgttgggacccacaccccaactcgcattgcctgtagaatttcttttcgaaattctctgtgttggggcccctgactagaattgaaaaaagcttgttacaagcgcattttcgttcagtcaactactgccaatataacatcgtagagcatagaacattgatttatgtcccagcctgaagatgatttttttaggaagtatattacagtactacgtattagaaaatcatctttgaatcagcgagtattttaaacacgtgttacttatttaagtgatgcgtgttttttaatggattacccaacatattttgtattacagtaatagtaactttaactaagtattgaatagaaagtaggtttattatggcgaaaataaattttgatgctgcgacgaaaggaaatccaggcataagtacatgtgccattgtaatcaaagaagatgagcagcattatacatatacacatgagttaggcgaaatggataaccacactgcagaatgggctgcatgtatttatgcactagaacatgcacgtgaattaaatgttcaaaacgcactattatatacagactcaaagctaattgcagatagcattgaagctggttatgtgaaaaacgcaaatttcaaaccttattttgatcaaatagaaatatttgaaaaagattttgatttattatttgttaaatggataccgagagaacaaaacaaagaagcgaatcaacacgctcaacaggcattgtataaattaattaaaaagaataaataaaaggagcaccgactgatgtgatgtcaatcggtgctcctctatttatcaaagaaacaaattattttttatttttcttagctttctttttcttctttttagctgctacctttttagaagtattttttgatgctgactttttgtctttggattggttatctttttgatttttctttttagccaataataaaggaacgtcctcatctttagattcaatactagttgttgtttcaacatcttcctctttatctttgcgtcgttttgcgaataagagtggtgaatgttcgttatctttcaacactttttcatctgtgttttcatttgtaacttccacatcttcttcatcttctttacgacgacgttttggtaagaagaacggcgtatgtttaactttatcgagtgactcgccattatttagcgaatctttttcttcaacagtaacatcttcttcatcttcttttctgcgacgtttcgcaaataaaagtggtaaatgttttgtatcgtctaaagtctcttttattgaatctttattattatctcttatttctaattcttcctcttcatcttctttacgacgacgtttggcaatgaagaaccagaaactagctagtaaaccagagatacccaccacaccaatagcgtttttaataacattaccgaaattattactaaagtgacgcatatgaagtggatcaatgtcatcatcttcatcaagtttctttttatgtccaatagtcgaactgttaaatggatgatttgcagttccataaccaattgttaaatggctattagattcatttccagtacttgacgattgtttagcacgatcagatgttacaatttgtactgctgaaattcgagcaataccattgttcaatgcagcctcaacttgctgtaatgtatgcgcattattaatatctctaattgtttcaagcacaatttcgttaatttgattcattgctgcttgtttttcatcagctgtgccaatttcactatttcgaatactatttattttttcatttgaaaagtctttaattctactaatagcttcttgcttgcgtttagctagttcttttgctgttggattagctgctttcatttgagctttaaattgttccaattgctcacttatttcatcgatgctttgcgcacgttgaatcgcttgaattgcttgttcttttaattgatttaacttagcaatagcttcttgcttctctttatctgttagatcagtacgagctttgatttcatcaatcatatgttgaattgcatcttcaatcgatttaattgcatttgattttgcttgttcaatcgtaaattgttctggattaaattgttcaatatgcgcttgttcttgttgttgaatttcttcaactgaatgaacatcaggtgcattgttaacatgatcaattgcttgttgtttaagcttattaacttctgcaattgcagcttctttttgttccagtgttaatgtcacactattattgatttcattaatcttttgttgtgccgcattttcgattgattcaattgcctgttgtttgactactgacaattctttttctacaacttttacaggaacattaacaatcacttttgatccatcaagcaatgtaacttcaacttttgctgttaagctatcagaaatcgttgcagttgatggtgtatcgatgacttctgctgaaagctgatcaattaagtttatgtgtgcaagaatatcttgttctgtaatgatgtcatcacgatgtacaatgagttcaccattaactaggatttgctcaggtgttgcttcaaaaatttcatttacagcaggttgttcatcaacctcccatacatgtgtatttctaatgtcatctaaacctaagtttaatcctcgatttaattgatctatagtttgagcattctcaacgttttgtagtgctcgtttttcagcttcgtcaatttctttgagcgcttttgctttttgctcaggtgttaaatctggatttgaattgatttgatcacgcttcgcattagctaaggcttttattgcatttttcgcatcttctttagctttcactaaatctttgatgtcttgcaatgcttgtgcaagttgtgcttttgcctgctcaatttcttctttagtcagcgcattgttaatgtcgttatgaccttgttgaagtatttgattaattcgatctttaagtgcttgtttttccttatctgttagatttggattttgatcgatttcgtcaattaaagcttgtacacgtttatcaatatcatttttcgcatcttctttagctttcactaaatctttgatgtcttgcaatgcttgcgctaaacgttcttttgcttgttcaattgcttcttttgtcatcgcattgttaatgtcgttatgaccttgttgaagtatttgattaatacgatctttaagtgcttgtttttccttatctgttagatttggattttgatcgatttcgtcaattaaagcttgaacttgtttatcaacatcttgtttcgcatcttctttagctttcactaaatctttgatgtcttgtaatgcttgcgcaagttgtgctttggcttgttcaatttcttctttagtcatcgcattgttaatgccgttatgaccttgttgaagtatttgattaatacgatctttaagtgcttgtttttccttatctgttagatttggatttcgatcaatttcgtcaattaatgcttgaacttgcttatcaacgtctttattggcatcaatttttgcttttggtatttcattggcatgcacttgttcaatcgcgtggttgcctgctgtttgaacttgagatacagcctgattacttgttgctttattaatgttgttgatgatgctgtttgccaattcttctgctttatttttcgcaataagcttgtcttgatccgtcgcatttgaagcttcgatttcttttagcttattagctaaagcttgattaatagattgaattgccttgtctttagcatcttgtagtcgttgatcaccattaagattatggattgcatcattgactgcttggattgcgccattgatatcattcacatttgtgttatcactatttagcaatgtatttgctagacgtttggcatcatcgaagtttgttttagcattatcgtcagcgttttggtaattgacagtttgctctgcatttggaatttcattgtcaactaaatgtttcaatgtttccattgcatcatttaagtcaatttgattattaacaatatctgttacatctgatacagtatcggcattgttaattgctttatgtgcaagatcttgttgctgttgatttaatccatttaacgaattaacaaacgcatttgctttatctttggcatttgcaaggttttggtctccatttaatgcattttgagcatcgataatattttgtttcaattgctctgcttcagcttttgcaattgcattaccttgcactttatctaactcatgtgctgcattcgcaattgcattatcataatttgctttcaaattgtcatctgcattgatgtaatttgtgctgctgataacaccaaggtgctgttcgtcaatatattgttgtactgaacccattgcattatctaatttagttgctctattaattgctcgagatgctttatttagcgtttcagcattattaatttgttggattgctaattgtctttgagcattgtttagatgtgttaattgatccaatctttgtaatgcttcagctttacgattattaagtctttcttcaccatttaatgctttcttagctgcagtgactgcatcatttaatttgataacttgttttgcagttaagttttgaccagtcgatttatcaagtgcttgtttcgctttatcaaccgtttcatcatatacttgtttgacttgtgtatctgcattgacatagttcgtgctacctttcgtgcgtccttcattgtcagtgatttcttgtgacaattgatccattgcacgattaagtgccttagcctcatctacaatttgttggatttgatttaaatcgtttgattgatcgatgcgacctttaaatccatcttgttgagcattgtttaatgcattcaattggtcgatgtcatgtttaccatttgttttagcaagtgctacacgttcatcaccatttaatgcttgttttgcatttaaaatattttgaagtgcttgatccacttgttgcttattcgcattttgtttcaatacattttcagcatcagcaatagcttgtttataagcattttgtttatctgaatctgcttgtgtgtaatctacagtttgctcaacgttagcatgttcattaactgcttgttgtaattgatccatagattgattcaattgcgttgcttgatctactaattcagcaattggttgaagtttcgtcgcttgatcaatgttttgtttagcagttgcaatttgatcagcatttaaatgtgttaattggtcaatagtttgtttcgcttgtgttttagcttcagcgactctctcattaccatttaactcattttctttttcttgaagcttagttaatacttggtctacagcgtctttattcgcatttgaaccattagttggatctgtaatgctttctgcagcttgtaacgcttgatctactgcttcttttttatcagttgacgcttcagtgtaatttggttgagccttatctgtattcacttgatcaactttatttttcaatgtttccatcgcgtgatcaagttcagtagcagtttgaacatgttgtgcaacctctgttcttgtaggcgctgcatttatagcatcagttaatgcttgttgttgtgcatgatttaagtttggcaatgcatttacagttgttactgcttgttgttgatcacgagcaagtttttgatcaccatgtagattatcttttgcagttgttactgcttgtgtcaattgttctacttgtgatttgtcgagtgttggattacctgtttggttaattaaatcttttgcattttgaactgctgcttggtaagcatctttttgcggtttatcttcattgataaacttgctaccagattctgtttgttgttgatcttgaatactattacgtaatgcttgcattgcttgatcaagcgcttttgcttcagctaatttttgtgctacttcgccacgagttgctgcgttgtttatttggctttcaagtgcttgacgttgcggattattcaaaccatttaattgatttaaatcagtaaccgcatgttgtttatcgtctgcaagtttttgatcaccgtgtaggttatctttagcttggttaacagcttgtgtcaattgttcaacttgtgctttatcaagcgttggattgttagtttgattaattaaatcttttgcattttgaactgctgcttggtaagcatctttttgtggtttatcttcattgataaacttgctacccgcttccgtttgctgttgatcttgaatgctattacgtaaagcttccattgcttggttaagtgcttgtgcttcagttaatttttgtgctacttcgccacgagttgctgcattattaatttgattttcaagtgcttgacgttgtggtgtattcaagttagacaagttatttaacgtttctgttgcacgttgcttatcttgagctagtttttgatcaccatgtaaattgtttttagcatctgtcactgcctgtgtcgcttgatcaatgattgatttagctaatgtaggatcagttgttttgttaatcaaatctttcgcgtgttgtactgcttgcgtataagcatctttttgcgcttgatcctcgttaataaatttactacttgcttcagtttgtggttgatccttaatactttcttttaatgctttcatcgcttcatttaatgcttgcgcttgtgcaatgatttcagccactttatcacgagttgttgcattattaatttgattttctagcgcttgttgttgagctggtgttaattgatctaaatgatttagagaatttccagcagtttgcttatcttgagctaatcgttcaacaccatctaatgcatttttagatgatattactgcttgagtcgcacttgatacattacctttattgatagttggattatttaatcctgcaatgatagactcagcattttgaactgcttcatcataggattgttttttattcggttctgcattgacatatgcactgctcgcacgtgttgcatctttgtcagcaatactttgttgtaatgcatccataagttgatctaatgcttgtgcttcagtcaaatcttgcttaactgctgttctagttgtttcactatcaattaacgtatcttccatatgtttttgtgcattgtttagatgtgctaattgactaaccgtttgcttagcatgatctttatcattttgtaacttcacatcaccatgtaatgctgctttcgttgtattcacagttgtcgctgcttgattaatcgcattattatctaatgttgcagtttgttcattgataatattatttgcggcttgaacagcttgatcatagttttgttgctctggttgatcttcgttgatatatttgctatttgctttagttgctgcgttatcttgaatgctctgtcttaaaccatgcattgcttggttaagcgtattcgcattttgttcaatttgatgaactgcagttactaaagttgcagctgtaacttggtcttttaatgctgttttttgaggatcatttaagcttgttaaagcatcaattgcttgcgtcgcatttgttttagcaacttgtaaattatggtctccatttaacgcttgaagtgttgtttgaactttagtaatagcttgttctacttctgtttggttcgcattttgaccagtttgtttgttaatcattgctgctgcttcatttaccgctgtattataagcagtttgtttatcagtatcagcattgatgaagttaccacgttgttcaacggcttgatgatctgcaatcgcattaattaagttacccatcgcagtatttaaagattctgctgtttgtttgtgaccattaactgcagcaatatcagatgattgcgtaatttgtgattgtaactgttgcttttgcgcattattcaaatgatctaattgatcaagtctgttgtttgcttgttgtttagctgctgcaaggttttcatcaccatctaatgcaactttcgtattattcacttgtgtcgttgcaccattaacatcatctggattcatcgtaggcgatgtagtttgattaattatattattagcagctgttacagcttggttatagtcattttgtctttgcgcagttgcatcatgataatcttcagacgctaatgtcgtttgattatccgcaacactatttcttaataattccatcgcatgatctaacgtttgtgctttttgattaatcgtagtgacatctgtaacaagtggcgcttgtgtaatttgactttcaaatgattgtttttgtgcatcatttaagtgtgttaagttcgccaattgttgttttgcttgttgttttgcatttgccaaattgtcattaccatttaatgcttgtttcgctgcgttcacttcattagtgatgctttcaacttgtgcttgtacttcattagtaccactttgtttattcaataatgcttcagcttttgctactgcctgtttatacgcattttgtttgtcaggatctgcatttaagtaattaccgtccgctaatgtttgagctttatcattaatagcttgtgataattgatccattgcttgatctaggctcgttgctgtttgtttaacttggttcactgtagcaatttcaggcgattgatcgatttgaccttttaatgcttgtttttgagcatcgtttaaatgcgtcatcccacttacggcatctttagcattttgcttttcagttgccaatttagcttcaccgtttaagccatttttagcatcagtcacttgagttaatgcacgtgttatttcatctgggttaagcgttggatttgtcgtttgattgataataccttccgcttgagacactgcatttgtatatgctgtttgcttatcggcatcagcatcatgatagttctcacttgctttgacagtatctttgtttgcaataccttgtttcaagttactcattgctgtattcacattttgtgcattttgtttagtttgttcaactgtagctaacgcttgtgcttgattgatttggttacgtaatgcatcacgttgtggttgatttaaatcgcgtaacgtatcaagatttgctaaagcttcttgtttcgcttgtgctaatttttcatcaccgtttaatgcatctttcgcttgattcatagttgtcactgcttgtgttactgtatcaggcgtcaatacaggtgttggtatgccatttgcgatttgttgcgcttggttagccgcattgttatatgcttgttgtttgtcttgatccgcttgtgtaaagtcaactgactgtggtacttgactgttcgcttgaatttgttgtttcaatgtacccattgcattatttaacgcatcagcattttgcttaatagcattaacacctgtaacaagttctgcatgcgacacttggtcttttaatgctgttttttgtggttgatttaagtttggtaactgatcaatggctgtatttgcattgtctttagcaacttgtaagttatggttaccgtttaaatcacccttagcttgattcacttgttgtaacgcttgagccacttgttgtggatccacgtttgcatttggtgtaccactaattatttgttcagcatgtgctaccgcattgttgtaagcattttgcttatcagtatcagcattgacaaagttaccatttgctttagtttggtctttatctgcaataccttgtttcaattgtgtcattgcttgatttaaatcatttgcatttgtaatcacttgtttcgctgcatcttttgcacgttgtacattgtcattaccattcaatgcttgtttcgcttcgttcacacgttgcatcgcttgttccacttcagtttgacttgcattgctgccatttgctttagataaaataccttctgcatgtgaaaccgcattagtataagcatctttcttagcttgatctgcatcagtaaagttaatgctatttaatgtctcagttttatcttgtaatgcattgtttaagttagtcatagcattattcagattttgagcattttgcttaacattattaactgttgcaatatctggtgcttgttcaacttgagttgttagcgcttgtttttgagcatcatttaaatgatctagtgtaccaagtgttgtcttagcatcttgtttggcatcagctaatttttgattaccgttaagtgcttgatttgtgtcattcactttagttaatgcttgttgaattgtatttggatccattgttggatttgttgtttgttttaacaattcttctgcttttgttactgcattatcatatgctgtttgcttgtcagtatcagcatcgtgatagttctcgctacctttaatttgtgctttattcgcaataccttgtttcaattgtgtcatcgcgtcattaagcgttgtcgccgcttgttgaatagcattgacgtttggtacaagtgttgcttgcgtgatttgtttgctgtattcatcacgttgcgcttggtttaagtttggcaattgatcaatagcatgttgaacattttgtttcgccgttgctaagtttgtattaccatttaaatcatttttagcttgcgtaactttatttaacgctgcagtaatttcgctaggtgtaacgacaacatcaggcgtagcactaattaatgcttcagctttcgctactgcttgattatatgcattttgcttatcaggatctgcattgacaaagttaccatcagcttttgtttgttctttatctgcaatgccttgttttaattgtgtcatagcattgtttaactcttgtgctgtttgtttaacattgtttacaccagctacagtagttgcattttgaacttgttgttttaatgcgtctttttgtgcttggttaaggtcattagagctattaattaatgctgttgcttcgtcttttgcatgttgaacgttggcattaccatttaatgcttgttttgcagcattaacttgtttgattgcttgttcaacttcagcttgtgttgcattgccgccattagcttttgaaatgatattttcagcatttgtaacagcagtgttatatgcttgttgttttgcttgatctgcatcagtgaagttaactgtcgctttcgtagcatctttgtcagctatcgcttgtttcaagttacccatcgctgtatttaagttttgcgcattttgcttaatttgatttgcttcatcaacagtatgcgcgccattaatttgatcagtaactgtttgtttttgcgcattatttaagttatctaatgaacctaatgattgtgacgcttgttgtttcgctgcctctaggttttcattaccatttaatgcatttttagttgtgcttacttgtccagcagcttgattgataacagtcggatctaaagttggacttgtagtttgatcaataataccttgtgcagttgtgacagcattattgtacgcatcctttttattctgacttgcatcagtataattttggttttgttttgttgtcgcattatctgcaatactttgacgtaatttgtccattgctgcatcaacattgtttgctttttgctcattaccttgtgcttctgcaacagtagtcgattgttgtaccaattgttttaatgcctctttttgtgcatttgttaaatggcttaaaccgtcaattgctgtatttgcgtgttgtttagctttttcaaggttttgagtaccattaagcgctgcttttgtagctgcttcatcattaataccattttgtaagttgctcattgctgtatttaattcagatgccgttgtagacacttgatttacacctgcaactgttgtcgcaccttcaatttgtgatttcaatgcttctttttgtgcattattaattgatgttaggttattcaatgcatttttcgcagttgtcttagcgttcgcaacattttgattaccgttcaattcgtttttagcacgttgtacattttctaacgcagtttcgacaccgtcttttgaagtatttggaccttgtgctttatttaaaatttgttcagcttgcgtcactgcatttgtatatgcattacgtttcgcttcgtcggcatcagtgaagttaacaccttgcttaatcgtattctgatcttgaataccatttttcaagttcgtcatagctgtatttaatgcatccgcattattttgtgcttgtgttacttcattaacatgcgttgcaccttcgatttgacgtttcactgcatctttttgagcgtcagttaagtcacttaagccgttcaaatgttgcttcgcatttgtttgcgcagttcttaagttttcttgaccgtttaacgcttgttgtttagctgtcacttggtctttcgcttgattaatttcttgcgcattcattgatggactagttgtttgaccaatgattgcttttgctgcagtgactgcactgttgtagtcagtttgtttgttttgacttgcatctgtgtagttttgacctgctttaatcgttgcttcattcgcaatgctatctcgtagacctttcattgcagtgtttaatgtttgtgcattatcacgaacagtttgaacatttggcaacgtcgtcgcttgacccacttgttctttaagttttgctttttgcggaccatttaaagaagttaaaccatcaattgcagtgttagcattttgtttcgctacttctaaattatgattaccgtttaactgcgtcttagcattcgttacttgcgttgctgcatttgtaacatctgctggtgttaacgttggtgttggtgtaccactaacgatattttcggcagctgtaactttttcatcatatgcttgacgtttattcgcatcagcattgacatagttaccactagcttttgtctcagctttatcagcaatggcacgctttaaagctgtcatcgcagtatttaattcagtcgcagtatgttcaacaccatttgctgcagatacacgtcctgcacttgttacttgtgcttttaatgcttctttttgttttgtatttaagtccgaagcatttgtaatcgctgtgttagcagcctgtttcgcacgatctaagttttgaataccgtttaatgcagtatttgcttgtgtaacagcttgcattgctctttcaacatctgctttaggtgtattaccgccagctgttttatttaaaatagttgctgctgcatttactgcttgagaataagcagttcgtttagcatcatcagcatcttgataattttgactttgtaacgtcgtgtctttatcacgaattgatgtttctaattgacccatagcaccatctaattgttgcgctttggctttaactgtattaacaccttcaacatttgttgcttgtgtaatttcattgtctaacgctgtacgttgtgcattattaatgtgtgttaatgtacctaacgtttgtttcgcagctgctttagcttcatttaatttcgcatcaccgttcaacgccgtcttcgtactgttcacattttgcaatgcttgttcaactgctgctttgtctacattttgaccactagcttttgttaaaattgctttcgctgcatttactgcttgatcataagctgatttcttacttggctctgcatctaggtatttctgagtttgttttgtttgtgtctcatcattgataccattttgtaaactatgcattgcgttatttaattctgttgcttttgcagtttcttgatttacaccagctactgttgttgcaccatcaatgctacgcgttaacgcatctttttgtgcattgttaattgatgttaagttattcaagttgtttttcgcagttgtcttagcttgagctaagtttcgcgcaccatttaatgcctgttctttagttgtcacttgtgatgttacttgcgtaatagtatttggttccatcgttgggttcgatgtttgattaatgattgcttttgctgcagtaactgcactgtcgtactcgttacgattatttggacttgcgtcagtgtagttttgacctgctttaattgttgcttcattcgcaatactatctcttaagcctttcatcgctgtattcaacgtttgagaactatttttaacagtttgaacaccatctaatgtagttgcactttgaacttgttcttttaattttgctttttgtgcattattcaattgtgctaagccgtcaattgtattgttggcatgctctttcgctacacgtaagttgttatcaccatttaatgctgttttagccgcattgacttgtgatgccgcactatttacgtcattgactgttaatgtcgcattcggtgtaccactaatgatattttcagcgttagtcacttttgaatcatacgcttgacgtttttcttgatcagcattgacataattaccgcttgcttttgttctttctttatcagcaatagctgctttaagtgctgtcatcgcactgttcaattcagttgcagtgtgttgaacgttatttgcatcagatacacgttgtgcattgttaacttgtgtttttaatgcatctttttgtttttggtttaagtcatgtgcgttgttaattgtgttcgtcgcatttgttttagcttgagctaagttttgtgcaccatttaacgctgcttttgttgtattgacttgatttgccatgccattaatcgcattagcatccatatttggattgttcgttgcattaataacaccatttgcattatttacagcagtattgtaattatttttgttgctgtcagatgcatcaagataattttgacttgttttcgtcgtattatcattttggatacttgtacgtaatgcacccatggcagtatttaacgtattacctttatctttaacaccatttacacctgctacattttgcgcttgttcaacttgatgcttcaagttgtctttttgtaattgtgttaagttaggtaaaccatcaatcgtatttgttgctgaagttttcgcatttcttaagttgtcagcaccatttaaagccgctttcgctcttgtaactgcatttaatgcattatcaacgtctgctttagatgtgttaccaccagtttgtttatttaaaatgccttcagccgctgtgacagcttgcgtatatgcatttcgttttgattcatccgcatcaagataattttgatttcttaatgtcgcatctttatcattgattgaaccttgtaagctattcattgcgccgtctaatgtattggcatttgtttttacagtattaacgccatcaacagtcgtcgcttgattgatttggccttctaagtcagtacgttgtgcattcgtaatatggtttaaagtgcctaagttttgtttagctgccgctttcgcttctgccagttttgcatcaccattcaatgcatctttcgtacttgttacttgttgtaatgcacggtcaactgctgctttatctgaatttgaacctgtttgtttatttaaaattgctttcgcagcagctacagcttgatcataagcagttttcttactttgttcagcgtcacgatatttttgagtttgttttgttgcattttcatcatcaataccatgttgtaattgacccatagctgtattaagttcatttgcagtttgttggatacttgttacatttgcaacacgttgcgcacttgtaacttgtgcttttaacgcatctttttgcgctttatttaagttagtagcaccatcgatggcatttgttgctgtttgtttcgcttgcgttaaattatgtgtaccatctaatgcatttttcgttgatgtcacttgtgtagcgatttggttaattgcattagcatccatatttggattgcttgttgcattaatgacaccattagcactatcaacagcattgttatagtttgttttgttacgttctgtagcatcaagatagttttggccatttttcgtagctgtgttatcttgtatgctatttcttaacgtacccatagcaccatttaatgtgttggcacttgatttaacagtatctacacctgcaacattttgtgcttgttgcacttgttgtttcaatttatctttttgagcagttgttaaatgttgaagtccgtttatagtagtgtttgcatttgatttagcttgctctaaattatggttaccatttagggcacctttcgcattagcaacttgtgacaacgcgttttcaacggcagttttgtctaaatttgatccactatttttatttaaaatattttctgcgttcgtaacggcttgagtataagcagttttcttatctgaatcagcatcatgatagttttcacttgctagtgtatttgttttatcattaataccattttgcaagttagccatcgctgtattcaattgtgtactcgtattagatacagcttcaacaccagctacagttgttgcttgatcaattttagttgttaagtcacgtttttgtgcattattaattgacgttaagttatttaatgcatttttagctgcattcttcgcatttgtaacgttttgatcaccattcaatgcatttttagcacttgaaacattttgaatagccgcttcaacatcttgtttagacgtatttgcaccttgcgttttattcagaattgcttcagctctgcttaccgcatttgtatacgcatcacgtttagctttatctgcatcagtaaatttaacactttgtttaactgtgttttgatcatggatagcttgttccaagttacccatttgcgtattcaactcagttgctgcatttttagtagcagttacctcactcacatgacctgcacgatcaatttgtgatgagatggcagatttttggttatttgttaagtgtgataatgtatttaagttttgcttagcagtgttttgtgcatttcttaagttttcagcaccgtttaaaccatttttagcattattcacttgtgttgtagcttgggtaatcgcactagtatccatagtcggattgttagtttgattaatgatacctttcgcatttgacacagcgctattatatgttgattggttattcggacttgcgtctgtatagttttgacttgttttgactgttgtttcgttagcaatactatctcttaagcctttcattgcattgttcaatgcttgtccatttgtttgaacagtttgtacgtcttctaatctattggcttgtcccacttgttcttttaatttagctttttgaggtgtatttaattgtgttaatgcatcaatagcagtattggcgttttgttttgcttcacgtaatctttcgtcaccatttaattcttgtttcgcgctgtttacttgattagctgcagctgttacttctgaaggtgtcgtaacaaccgttggcgtaccgctaataatatgttcagcattggtaactttagttgtgtaagcattttgtttagtgctatcggcattaacatatttactgcttgctaacgtattcgtcttatctgcgatggcatgttttaatgtgcccattgccgtgttcagttcagtcgcattgtgctgtacatcttgtgcattagatacgcgttgagcaccattagcttgtgcttttaatgcatctttttgtttttgatttaaatcagatgcgccattgattgctgtaatcgctgcttgtttcgcattgtttaagttttgcgtaccatttaatgcatgtttcgcattattaacattattaagtgcttgttcgactgctgttttcgctgtattcggtccagtttgtttatttaaaatggtttcggctgctgatacagcttgattgtatgcattacgtttttgctcatcagcatccaagaagttttggctcgctaatgttcctgacttatcgttgatagccgtttgtaagttacccatagcaccatctaaactattcgcattttgtttaacagattcaacaccagctaagtttgtagcttgtgaaatttgatttgttaaatcattacgttgagctgtagtgatatgcgttaaagtacctaaatgttgtttcgctgcgttttgagctgcaattaattttgcatcaccattcaatgcatctttcgcattattaacacgttgtaatgctgcttcaactgcattttgcgcagtgtttggacctgtcgatttatttaaaatcgctttcgctgcagtaatagcattatcatactcttgttgtttatttgtatcagcatcacgatatttctcagatgatttcacttgagattcgttgttaataccattctgtaagctagccatagcttggtctagatgttgcgcattttgttttacagtatcaacaccactcactcttgtcgcactagtaatttgactaatcaaattgttcttttgagcatctgtaatacttgtcaatgtgtttaagtacgttttcgcattttgttttgcagcagctaagttttcatcaccgttaagtgccgttttagaactattcacttgctctgctttttgtgtaatcgtacttggattcatttctggattactattagcattaataatcgtttcagcagcagctactgcgttgttatatgctgtttgcttatcattattagcatctacgtaatcttcacttgctttagtcgcatctttgttggcaatactttgtcttaacgtattcatggcttgatctaatgtattggcatttgattgaaccgtttgaacaccagcgacagtagtaccactattaatttggtttgttaaattcgttttttgtgcagttgttaaatgcgtcatattatttaactgctgttttgctgtttgcttcgcttgatctaataaacgcgtaccatctaagttatttttagcagaattcacttgattcatcgcttcagtaacttgatctttcgttttattttgaccatttgatttatttaaaatatctttcgcagcttgtaccgcatttgtgtatgctgttttcttactaggtgtcgcatcttgatagttttgactattaagcgtcgtttgttcatcattgattgcaccttgcaagttacccatcgctgtatttaaatctgtaccttgttgtttaacagtatttacgccagcaatatttgatgcagcattaattttagatttaacatctgctttttgtgcattatttaaatgtggtaatgcatcaattgctcttgcagcatctgttttagattgtgctaatttttcataaccatttaatgcatttttattagaagtaacagctgaagttgcacgattaacatcatcaacagacatcgttggatttgttgtttgattaatgattgtttcggcacttgaaactgcactgttatatgcattttgtttagctgtatctgcatccgcataatcttctgtacgtttcacttgatctttatctgcaacagcttgtcttaagttacccattgcactattcaagtttgttgcattttgcttaattgtattaactgcatcaatttgatgcgcaccattaatttgcgattgtaagttttgacgttgtgcattatttaaattgtttaaatgacctaatgcagtattcgcttcttgtttcgcagcatttaacttagcttcaccattcaatgcatgttctttacttgtgacatttgataaagcattgttaacatcacttggtgttataactggatgttgtgcattaccattaataatgtcattcgcatggttgtatgcattgttgtaatcatttttcttattagtatctgcgttgacataattatcactttgtacgacttggttatgattagcaacgccacgttttaaacctgtcatagcagtatttaagctttgagtcgtttgtttaatatcatttactgcttgcacgttttgtgcactattcacttgttgtgttaatgcattcttttgtgcttggtttaaatcacttgcatgcgtaatcgcatttgttgcttctgttttcgcacgttgtaagttttgttgaccatctaaagcatctttcgtcgatttaacagatgctgctttttggttcactgtgttaacatccatcgttggattagtcgtttctccaatgacacctttagccgcattaactgcattatcatacgcttgtttattagctggtgttgcgtcagtgtaattttgatctgatttaattgtattattatccgcaacactgtcttttaatttcgtcatcgcagtatttaaagccgtaatgttagacttaattgtttcaagcgcagcatgattttgagcagcattaatttgttgcgtgaaattattttgttgtgcttggtttaagttagatgcaccatgtaatgttgttaacgctggctgtctatctaatgttaaaccttgacgtgctgtatttaattgatccttagcttggtttgcctctgtcactttatcattgatattttggacagttgggttgccattcaacacttgattaatttcagttaacttttgacgcgctgcttgtaatttttggttgtacgcatttaacgaagcggtcgtcatacctgttgtatccgttggttgattaatgctttgttctaattgcgttttcgcagtttgaagcggcgctttatctggtgttaaagcttgacgtgcatgatctaaatcagatttagcttgatttgctgtagacgtatttgtattaatttgttctacagtcggtgaacctgctaatacttgattgatttgttgaatcttattacgtgcagctgttaacttcgcattgtatgcatttatagagtcttgtgtcataccagttgtacttgtttgcgtgtcaatactatgttgtagttgatttttcgcattttctaaaggcgctttatcgactgttaagccattacgtgcttgatcaagtgctgatttagcggcattcgctgctgtcacgttttgacgtattgtcgcaacatctggatgtgaggctaatacacgatcaatttcttgaattttagttctagctgctgaaagtttttcattaaatgctgcaatagatgcgcttgtcataccagtcgtactcgttggctgatcaatatcattttgcaactgagtttttgcagtttgtaatggtgccaagtctggagttaatccagcaattgcttgttttaagctattatatttttcttctacttttgttttttctgcggcaatttgttggtcagtcgcatcaccattgttaataacattttgtgcatttgttgattctgtttgacccgcacgtttagcattttcatatgcttggattgatgattgtgtcataccatcagtagttactgatttattgatttcttcatcaagtttcgtcttagcagtttttaaagcactattatcagctaaaggtactaattgattaattgcttgcgttaatcgctcattgacacgatttacatttgttaacgcagattgcacttcttgtactgttcttattggcttttgaataatagcattagcgctatttttagcacttgttaagtcactttgaagtgcacgaatcgaattattgtaagcagtaatacttgccggcttcttaccagtcgttgtacctgtgcgattcaattgttgcactgcttgctctaaggcatgtgtatctgcagttaaatcatgtttcgcttggtttaatgctgttaatgcgttatcgacacgatgtttttcatctgaaatttgttgtgcagttgcatcgccattgtcaataacacgttgagctgcagttatttcagtttctgcttcacgcttcttcgcattatagttatcaatactttgttgcgtcataccagcagttgatggtacttggttcacagaactttgtaagttatttttagacgttactaattggctattatcttctttattttgaagtaatgctttagcttgatcaatcttagtttgtgctgcacgaactttagttagtgcgtcagaaacttgttgtggtgttgcacgctcattattaatcacttgttgtgcttctgttttcgcagtattgatttgttgttgcgcattatgcattgcattattgtactgcgtaattgtacctggctttttaccttcagtgcttactggatcatctaaatgatttttagctgtgattaactcacgtttatccgcttttgtgaaaatggactcttgtacttcttcagtactaccatcattgtaagttactgtcacaggaatcgtcgttgtgctaccaccagctaaattagtaggcattgctgtgccatttttaatcgttgcagtacgtttattagcaacttgaactgcattgttaatttcagctgctgttacatttgaaccataatctttcacaatttcagttgtgttgacagtatgagctgccggtgcagttaatgtacttggattactacttactgagtgacctgtacctgctttcggagtaattgtgattgatgaatttggttttatagtattggcattgaacgtcactttaccagtttgtgcatctaacgttacatagtcaggcttattcgcaattgtccattgattattttgaccacgaacaacattaattgtcttactatgttctgcaccattacccactttttcagtgtaagcaatatccattgcttgagttggattaattaaatgtcctgatggattattaggcgtgatatcaatatgaccattttgccaaatcttagtagtcgcttggttcggttgtggtgcgacaactgtgaaatcatcactacgttgctcatcactcactgtctctccgcttccttgcgttgcaacaacttgaattgtatcagcagggttgaaagtacctgctgcaacagtaataccattattagttccagcaatacctgctacagttgctgcagatgcttctttcacccatggactcgtattattgcgacgtgtaaatgtcgtcacaacgttaccattacgtttaataactaatttatcagcgtatgtcgttacgttaccggcatgtgtattcactgtttggtttgctccaggtgcaattgtaatcgctcctgccgctgtttcagtcacagttggtttcgctggttgcacatcttttactacaaatttcgctggtaaagatgttgcaaaagtatgtccgttatagatgacgtcatattttgcgttaacgactttagccacattcggtttattcatagctgaccagtttgcgtcatttgtacctgtagtatcacgattccatttatacgtaaatccatctgttggtaaaccagtagcattttgcatatgtgcatatcctgatgcttgcgtaccacttgctaaagtgcctccaaccgttgtcgtataagtagtttgagggaattcaaattgatatacattaacagtaacaggaactcgtttagcagctgaaatacctggatatgtgacatcgacatttaaatgttgcacgcctgcttgttggttatttggttgttgtctatttgcccatgctgcagtgataccatttgtgtttgtatttggatcaaatgtaatgtagttcatcgcatccgttccattagtcaaattttgacctttcacatcacgtgatggcgcctttgcattagcaactggataaactttgactggaacttcaacattacgcgtaccttgaccattaggtaatgttacaaccgcagttttatgagtgttaccgactgtattcttccatgtatctggactatcatgccatgcaaccgttgccccatgtggcgggttttgaataaatctttctacgtgtccgaaatcaaaaccgtcgccacctttaataaatacagcgccttcagtagttgcttgtaattgtggtgtcactgttactgttgcactgtcatttgaatcaacagattcatttcttgttactgtaacaacttgaccatgttcgtcttgcgtcgtatacgtcacattgttcattgaaattgaagattttgctttaattccgccatttggtaacgcgtcacttactgtcacaaccgaactaaaaccgctaccatgagtaatatttgtgacatttaatggtgtattatctgctttaaataattttactgacgagttatttaatacgttattaactttaatttcttggtttgtaagacctgctttatatgtcacagagtttgcgtcaattctaggtgggtcaggtttaactttagataaaatagttaaatcttctgtttgtctattatcatatgtcactctaataagacgagtagatatgcctacaacatctttgttaggaccatatgttccaacaaattggaaattcatatgttgcgcatttgtcgaccaagaattatttactggcttaacatattgtttcgcatcatacatatctgaaacacctgggtataaaacacctctggctgtttcaaagacatgtttcggtacagttcttactactttatatgttgctgttttcgtaatcggcgttgtttcgccatcaattaagatatgtgcagttacagttatatcttcaccaatacgtgtattatctttatttggcgcttgtccacttacccatgtaatagttgcatctgcaatgtcactaccattagataacttaaagtaatctgatgcactagaaccattacctgctgggaagtcttggccttgtacagtgtaatgcgaatgtgcaacgatttctggaatgacatgctttacaggtacagtcactgttgatgttgttccatcttgataagtaacagttactgtgacattggcattatttccagtacgactgacattactaactgttttactagtgatttcattcgcacttgctcttgcataacttctatttggtactgtttcagtaaacgttaacgaattaataattgtcgtttgatcagcttgtgatactgtcgcattattcgaaatattggcaattctcacaggattagcagccgttgatgaagtaccaactcgatatttatcacgcaaaggtttcactgttacattgaacgaagttgtagctgtattgccgcttgtatcagttgctaataaattgattgtcttattagttgctgatgtcacatttggtgccgttgcagaaacatgttgatggttattatcaacagtacctgtaatttgtgatgtatttggtacagttacagattgcacaccaaagttatcattcgctgtaatagtatttgtaaatgtttcacctgagaacacttgatgattagtgtaattacctactgaaattgttggattcactaagtcacttggtacaaaataaatgttaatagcgtcagtagtatttcctgtattttgatttaaatgttcaacatattgttttggaccatatggcgttaagtataactgtgctttataaactgcatcacttgcattatgtgtagaattactttttacaacgtggtcaattgtaaatgcgccagcaccattagctgccggttcgtttacgttaacaacagttgagttactatggtttgcacgagtatttgaatttgtaacaggttgcccaccataaccgtttgaagggttgatgatgtctaacacttgaatcacttgaccattcaacgtaaattgacgttgaccatcagttgtcgcatttgattgtgaataaccagtcgttctaaagttaggtcttccgccagcttctgcttgtgatttttcattaccagtaatgttatttcgcaatccaggcactgtagttgttgcttttaacattgttaaaatatcattcgtcgtaatttgagtacctaatgtagcatcataacgataaattaaagatttatggtcatcagaccatgataaaccaccatctgttggtctgtttgcaatttttgcattcgtccatgtcactgtataatcttgtgggaaattaacccaacgcaagaaattcatattagctaggtttgacgcgaatgatttcgttaatcgacctttattaatatttactgtaatagtacttacattagcaccattaggtgtatttgtaactgaaatatcaccttcggcaagcgtaattacatctctatttgcattaataaatgcttgttttacttttgagatttcatcagtagttaaatcatatgttgatgtacgatatacacgttgatcgccttctggttgtttcacatcgatgattttcaaactaatatagaagtcttcactatctttatgatacgcatttgtagcagttatatggtataactgcgtgcctgcgttcatttgactaacttcttgtgcagttggaatagttctatcagatgtaatatttgtaaatgtgccacttggaataggttgtccattacttaaagtaaaatattgtttaatatcaccaatactaaatgattgtcctttagcaatcgttaccgttgctgttttagcagcattgacagtttggtattcaggtttcacaactggttcgtatgtcatcacatttgtagcatcaagcgttgtcgatgagccatcacggtaatgtaatgtgacattaccattattatcgacagttactggatcagttgatgctaaatatcctcttatattttggtttttattcataaaggcagtaattatgctttgcttttcatcattagatacagcagtcggattgactactacaactttctcagtatttcctaatacaatcggatgagcatcttcactaattttacctacatgaattgaaacatgtttagattgactatcatttgtcgtattattgacattgtctgtcgctgacactttaaatgtaatatcactgttaaatgcctgattcatactcactctacctgtaatagataatgagccattattcttatccgcttttgttaaatttgatgtccaaccattcggcaatgtcgtaatagttgtattttttataccagaatgtctatcagagacacccattgtaaagttgacttcgtcgcctcgatagtatttggcatttattccaacaggattattgattgttggtggaatgtcatctggcaaaatagtaacagcattactcatattagatgcaactactttattataataaactactgctctaatttgtttacctacaggtggtatgaatacaacataatcttgcggtcgtatagtaattgtattatgcaccccatcaggtgtaccagtcgcaagtatcgtataaccagatggtatttgatctgcctcactaccaccattcgtagtttgatttgttggtgcaactaaataaaccaatgccgatggatccaacggtattcccgaaatattaacaggcactttttgtaatgctgtacctcttaattgctcagctgtcgttgtaattgttggtgtatgtggtttaacacgaatttcgaataattgttctttacgtccaaaacgtatcgttccaaagtaatcccctggtaataagttaccaacaagttcaatattgcgttctctggcattattaggtctatttgtcgagttttcaatgtgtaatgtacgcggaatacctgtaatttgccaatctttatctgtaaaattctcattacttgttaaattaatacgtaatggttgaatagatgttacgctaccacctaaattcacggaagcattcccttggttacctgcatatacatagaaaactggatgcccagcttgttttgaaaatggtttttcagcaatattttgagtatcgtcatttttaaagaatttaatattatgttggatttcaggtaataccgttaagttaacaggaactaaagtttcactattaccataagcatcaggatagtcgaaaccaatcattaatcttattgggtttctagttcttgctgcttcttgtaatttttgatcagtaaataattgacttaattgatattcatttaattgttgggctccacccggtctaaaagcattagtatttgcattattcgaataaaatcctaacactttattactcggcgtcttaacataacttaaaggatcatcaacaaaatcatctatatttaggtttgtactttctaatacctttttcgtttgtacatttccttgactcacttctacacgtttagttgtacctatgcgatatgtacgattaaccacttgtcttaaaccattaagacgttgttgatggtcttgcgttgattcgacgtatagttgactgtacataaataattgattgtactctaaagcacgcccacctgctgcatagtacaatttattaacagttggaccttgtgttttaaatgaaattgtataacttgcatcaccttgaccgatgaaagtataaactttaggaacacccggtgattcagcaggtttttgaccattaatatattcaaaattttgtctaccaaaagctttagtagcaggtgtcgctccagcttcactaaaataatcactcgctctagataaatcttctaaagaataaatatggacagttggccagtcatatattacttggccacttctatttcttattttaaagtcatgtgaacgatgaggatcatttactccatattcccacatttgttgaagtggtttatttgcacctgctcctgctccatgactccattgtacatttgttccatctgaattaactgttacaaagtcagttcttcctactggcacttggtctgctggtaatgcaaaccaaaagatcatattttgatgtggagcatgtcctttattaaacttaataacccattggtacccgtctccagtttgtttcgctgtcataagagcaatttcctttgagtcagaggccttcaatgtattccatggtgtagttggtaaattatatggcgcccctttactagaagcattgatatatgtaccaacaggatagcccgaaccatcattagcattttcaacataatatgatgaatttgcattttgatagtctgatactgatctaggctctgcagctcttgactcaaccgaacgcgtttgaattctatttgaacgtcggctagtctgttgacgttgaggcattgtacgaattaaagcaacagcttgttccaattctttgtatgcaagttgcaagtctttattgtttattggatcattactgcctaataacgtattaatcttatcaaaaatgccttttacatagttaaatgtgccagaatctgcattttcacggtcaataaagcgataatcatgataatttgcatcaaaaaacgcttgtaattcatttcggtcatgttgtacgttaccattatcagatgaatctgaagctgttactacatttgcttcatgattttctacatgagccgctctattgtcgtttccatttttattagcagattgactttcgttttgtttatgcttactttgttctttatctggttgtgttgtcgcagccgttgccgaatctttctttgtatttacattttgagatgctggttgttcatcattagtagtagatgattgcgctactttttgatctactaaattagcttgactaatatttggttgctcattttcatgagtagcagataatgattgaccattttgtgaattttgagaattttgtacttgagattctcgattctcagtctgttcattattactttgttgtttctgtttaaccacgcttgctggttgatttgtttcagcagcatgtgcttgtgatgtattgaatcctaaaaataccaatgtcgcaatgacagttgaaaatgtaccaactgtatatttacgaatactaaacttttgaattttatcacgataattcacagctattgttcactccttatcttgttgttatgtctctgttgtgttgtgaatgtatttacttttgattgcttgtgtattgtaatgctcattccattctcatttaaaaatttaaaacgatgacgattcaatacaatttcgcaatctatccaaaaagtattgaaacacattacaactatgtgttgaacaatttatttatgctccagaatataataacacaaaatatattgtaaggtaaattgaatttgtgacaatttataataattataaataaagtagcgtaaaagagtaataaaaaaccaatccctatgttcatttaaaataatgacacataagaatcggtttatatttttgtttaatattgtagcgacttgtatgatttcaatttaattctcaattatcataattgagtgtcgttttgtttaggcacaagtaacaaaatgataacgaatgataatattcccatacctgcatttaaccataatgcaatcattgcacctgtataaatgtttgtcatatttgatacgattgcatatactgcaccactcaatgcgacgccaaatgctccacctaatgcagaagccattttatagatacctgcagcaacgcctactttttctaacggtgcatttgcaattgctgtatctgttgatggtgtagcatatatccctagtcctaaaccaaagaataaataacctataatacaacaaatgacatagaatatttctggcaagaaagttaatgaaatgagacattctccgacaataagaactcctgttccaattaacattggtttcttgcatccgagtgtttgaagtaacttttcaccaacacgaatcataattagtaccattactaaataagtgattgataaacttcctgcttgcaatgaagaatatcctaaacctctttgaacaaatgtgttggctactattaatgttcctgcaacaccatttaacaaaaagtttgaagctgttgcacctgtgtaagctttatttttaaataatttaaaatcgattaaaggatttgtagcacgcttttcaagaactataaataaactaaaagatccaattgcaatagctaataaagtaataaaaagaagtgaggttacacctaattctgatcctttagtaattaaaatatttaaactgaggagcataatgactaaaagaaccagacctttaatgtcaaatttatttagagaaatcgatttagatttagtttcaggtgtgcctttaataagaaacagtgcaattaatgaaattataattgataggatgaaaatccaacgccaacctaaaagcgttgcaactgcacctccaaaaaatgaacaaacaccagagccgccccatgagccaattgaccaataacttaaagcgcgttgtctatctttcccaatgtaatatgacttaataatagacaaagttgcaggcataatacatgctgctgaaagtccttgaattaatcttcctataataagtaataaaggaatatttgaaataatgattaataatgaacctaatatatttaagataataccaatgttcgtgagtttaattctgccatatttatcagcaagaccacctgctcctactacaaacattcctgaaaataaagcagttatactaacggcgatattaaccgttccaatatctgtattgaaactatcttcaagtattggtacaacattaaccaatgattgtgcaaatagccaaaacgttattacacttagaacaattcctattaacaacttattattgccttcaaatgcctctcttgacggcttttccatctctatttgcctccctatacttttgaaaaacagacaaattccataacagaaatttgtctgttccatagaataattgaatggtttttgattttaatgtgtaaaactttaaatttattagtagtccatccatttattctcaatgctagttatcttaccttatgctgctttttgtttctttttatagtaataaactggtataccaagtgctgttattagaattccaatgattgctaatataaattgtgtaaacagtgtattaattaatacaaatgatcctgccaaaatagcaattaaaggtatgatcggatataacggtactttatatggtcgttccatatttggttcacgttttcttaaaattattaccgcaacaaatgacatacaatagaacaaccaaataacaaagattaacatatttgtaattgtatcaaatgctcccattgacatcatgatgatagcgattataagttgtataattgcgccaaaccatggtgcgccagattttgttaattttgcgaataaatggctaaatggcaataattttctttcagccattgcatatggtacgcgcataccagtcatagtatagccattgatcgtaccataaacagaaattaatataccgattgtaataatcttaccgccattttcaccaaataatatttttgatgtatctgaagctgcatttaaattaccagcaagtagttctattggcaacgttaataagaatgtagcgttaattaataaatacacagccataatacaaccgataccaactgaaatcgctaaaggtaaatcgcgtttaggatttttaagttcccccgcaacatttcctacatgaatccaaccatcatatgcaaacatagttgctaataaaccactaccaattgctgtaaagaagccatttcctgaattacctgtagttggaattaatgaaaaagtgatatctccagattgaaaaataccaaaaattacaataacgatgattggaatcagtttaattactaaagtaactgattgtaaaattccgcctgcttttgaacctaggaaatttatcaacacaatagataacgcagatgcgattgctattggtattaacgaacctatagataaatggaataaattaattagctgtgtcgcaaatacgatagacaatgctgctacgttagctggaaaataaataaatgattgcgcccaacctgataggaagccccagaaatcaccgtatgtatattctatatacttcgttaagccacctgtttcagggattgcagcagcaagttctgctgctgttaaccccgcacaaatggtaatgatgccgcctaggaaccatacaaacaaggccattcctgctgttcctgttacttctgttacgtttgatattttaaagaatactcctgaaccaataactgtccccataacaatagcaaacgctgagaagaaacctatatttttttgtaattctttaccatttgacataattacacctcatttttaagattaaatgttttaacctaccacacccttgcttgtatctgcaatattcagtccatgttcaatgacacctgaaactctagttaagtcaacattcccgcctgaaactaatgcaacaacatttttatcttcaagccatttattgtttatttttccacttaaaattgcagctgttggtaatgcgcctgcaccttcagtaataattttggcacgctgcattaaatctttcatagcatgttcaatttcttcttcagtaacaagaataaattcatctactaaatgtttaactacttcatatgtttgttcaccaggaacttttacatcacaaccatctgctattgtgctatccactcgatgttcagttaaatctctcttatagaaagactcagccataccatgaacattctcagattgaacaccgataatatgaattgaagggttaaatgattttaatgcggtggcaatacctgcaattaatcctccaccgccaactggtacgatgactgtattcacattccaaatatcatctaaaatttctaaaccaattgttccttggcctgccattacaaacttatcgtcatatggatgaacgattgtcatgccattttctttcgctaattcttccatataaagtctagtttcgttaaagtttttaccttttaaaataacctttgccccatagccttttgttgcttgttgtttcgcttgtggtgctgtttcaggcattacaatcgttgcatcaatgcctaataatttagctgttaaagcaacaccttgtgcatggttcccagcagatgctgcgataatgcctttttctttttgttcatctgttaagtgattaattttattgctagcgcctctaaatttaaaagatcctgtgaattgcatattttctaattttagaaatacattccctttagttatactttggcttaaatacattgatttaattagaggtgttcgacgaataaatggtttaatgcttgctttagcttcttcgatatctcctaaacttacaatatgtgctgtttgtaatgtaactgtgttggttgtcataataattacatccttccgttttgtaaatttttagtccaaactataatgctatatttaaaatattcatttcactcaatttcatttaaattactatctattcgataacatttaatatttctttataatctaggtcatgtgatgaagctaatccttgatttgtcacttgtccttggtaaatgtttacaccagtacttaaggcttcattatctttaattgcttgttctaagcctttgtcacaaatttctaatatataatcaatatttccttgtgctaatgccattgttgaagttcttgggactgctcctggttgatttggtacaccataatgaatcacaccttcttcttcatacactggatcagaaattgtagttggtctaattgtttcaatagttccaccttggtcaatagctatatcgattaatactgaaccttttttcattgatttaaccatctcacgagtaaccaattttggcggtttcgcacctgaaattaaaattgtagaaataaatacatctgctttcttaatttgttctgctaaattttctggtgttgatttgactactgtgacatctttttctgcatacatatcttcaagatatttaatgcggtcatcgtttaactcgataatgattactttagcatttagtcccaaggcaacatttgctgcatttgttgctgctactccaccaccgaaaatcacatatgtactaccaggtatatccacattttcatgtacaccagtcactaaagtaccttgaccaccatgttgtgcttcagagtagtaagctcccataattgctgagcgttgacctgctatagcactcattggcgctaataattctgcttttccattttttataatggtttcaccactaatcgcagttacaccaacttcttgcattttttctactatttcttttgaagatgctagatgtaaaaatccccagataatttgattctttttgaaatattgatattcgctttcatgaggttcttttactttgataacaagatcagcttcccatgcttgttcgtgagttacgatcttagcgccttctttttcatacatatcgttagaaaatcctgaaccaatgccagcatttttttcaacaattactttatgtcctgcatccgttaacttacgcacattttcgggtgtgcaagctacacgtccttcaccttgttttaattctttgactactgcaactaacatttgcaacactcctctttcatttgtgaataatttcacaattattttatcctttggttatgaatatgtaaataccattaattaattattcatattttatctataatttgttaataaatatttaatatattattcttattcttaaatattatgtgcaattataccactatatttatttcttatactccatttgatttatagttgtattaatacattgactcaaaaactaattaatcaaatatgttttttagattaataaagttgtaactgtactattttgtagtgtatggtaatttatttggatgaaatataattctttatactctattgattaatcaaatatgtatctatcaaaattcggcttatttattcactctgacatatccaaatacgcaaaaagactatttctaccttgtatcgatagaaatagtctttttatacttaattggtttaatttttcataaaatcttatactttttaaaaatgggatgaaatatattttcctgaaacatgtaattcatgttcgttacaaattgataaaatatgattaagcgttgttgcaaatgacattttctcaaaaagcgcttcactatcaattggtacttgtgtgtgaatttcagccagtcgcttcgataaatatagttcatctaaattgtcattaatcttattacgttgcccagctgataatgcatcaatgttttcaaccacattttcaacgctttgatattgctgaattaacttaatagccgttttctcgccaatacctttaacacccgcatatccatctgctgtatcacccataaacgctttaatatcgattagttgttgtggttcaagggcatattcttcgttaaaacgatgtaatgtatatctattataaatgttaaaaccttttttaattagccaaacttcaacattgtcattaatacattgcagtaaatctttgtcgcccgtaataatatagacatcgttatcagttgaatattgttgtgctaatgtacctataacatcatccgcttcatagtttttaacgccaatatttacaaagccaaattgctctgaaatttctttaacataatcaaattgtggtatcaattcttctggtggtgcagaacgattttgcttataaccatcaaacatatcatttctaaaagttgattgtcccatatcccaacatacagctacatgtgtagggcgtatttcatgtattgccgaaaagatatgacgcacaaatccttgtattccatttgtaggttcaccttgtgaattgtacataaattgtttatgaagacttgtagcatagaaatgtctaaataatagcgccataccatctacaagtaatattttattaggcatttaaaacgttccttctttcttaatataaaatagttttcagttgttgatgtttatctttcaattgattgataagtgttgtatctaaatcaaatgctaataaatcgtttatttgcgtttgaatattagcttcaaaactttcaaattgcgattcagcttctacagccatttgctttacatataattcaagctgttgcctcaataatcccatttgtggttgtaataatcctaacgtactttgacaaattgattcatgtatatctctttgcccatttggattcaaaattttacgttttgttaattgtttaggcaatgcatttagcatatcgttgaaatcgatgtgcaataatggttgctctatattagctgattcaaagttaaactgaggattaataatgacatgtaaatctgctaattgttgaacgattggtgcaatttgctcagtgagttgcttattaaagtatttttttatacgttctgtaattaaagattgctctaaaaacaatcgttgatgaatttgatctaagtatactctcgtagacactttcttttcttcattaaaatcactattttgcgtcatttgagaattaaacactgatttaacatcgtcaagtagttgtagttttaaacgggcatttaaatgataaacttgttcttcaacttcgttgtctgtatgttgtaacgtcgcatcaattaattgatgttgtaaacgctgtttatctttataatctgttaacctttgttggcgacgtgaaatatcagctttatttgtttcaaattctgtaatcatctctacataagaacgatccatttgttgaagctgatgaatcatttgttgttctaaaattgatttagattcaacatcaacaaattgttgtatgctttgttttaattgatcaatgcccttatcttcagcttgcaatgcatttcgacttgatacagcaaaaatgtctgattgtaagtgtacttgtcttaatgcatctgatacatatgtttcaactgcttcaagatcatcttgactttctgctaaatcagcagcattaattaccattttaaatgcttggttttcattcaactggttcatatctttcatgtgttctataaacgctttgtcattatcagtaaatgaatgattaaaataacttacatacaatattaagtctgaagaagttaaaatttgttcggtttcatttgtatgcctttggttatttgagtgtagccctaatgaatcaacaattattttaccttttaaccaatcatgcattaatgcaatgtgtactgtcttaacaaatgttgcatattcatcttctgcactccactttttcaattcctgttgattaatggcatgtttttctccattttccaacatattgacatacaatttataatgtttttcaactgcctgaataaaagcgagttgatttttatttaaatgtgattttaacttttctaaatctgaattaataaagtcttctatagtcgaataagacatatcttggtattcaactactgcattaatttcatctaataattgcgattgtgattttagcgttatataactctcgtctccataagatatttctgtagtagctgctgtagtaggatttggagaactgactaaaatatgctcgcctaataatgcatttatcaaactacttttaccagcactaaatgttccaaatacacctatttttattaatttattatctatacgtgttaatgtttcgtggatatcttgctttgtacgcttgaacaaaggcacatccgaaattatatcaagcgctttttgaatatctatagacatatttgttgtagctgtattttgatttagctgctgattatcacgattatcctgagcattatcagtagccacttgatatgttgtctcttgtcgacctattaatttatctagagattcatctaaatgaatatagtagtgacgataattcttagtcgtcaatgactgacgcagctcatttaattctgtataacgttgatattcttttaaatcatcactttcttctgttggtaattcatctgcctgcacattttctattatttctttaaaaattggtgttgattgttgttcaacatatttcttaatggctttaaccacttcgtctgaaaatgtaagtacataagtattgctgattgatgtttgtggttgatataaaccttcaatcatttctggcttaacgtcataatgctgatttaatactttatctgaagcttcttttttattgataaaacgcgtaacaaatgacatatcttctcgcattggttgacgaatttgttgattaacatgttcttgtaacgcatctgtcgctgttaataatcgctgttgttgaatttgtagttttttcttctttttattaaaaaatccgccaacattaaagtcttgagacatactttccaaataacttcgtaacatttctctcatattatgcggcataatgtatgcattttctaaaatatttttacgcttattctttaaaaatgccattaattcatctggattatttaaaagttgtgcctcttcactaattgcttgatgttgttgactatttaaaaatgcttgttcaaactccgcttcttcgatacctaaatcttctagtacttcctgaatttcagactgaatgtaatctagctgagcttcggtaatgtattcaaccgttcttgatgtataatcctctattgtctctctatgttgatctaatgaaattagataacttgataatacttcaagttcattttcagggtgatcaaatttagatacataaaaggtgcgttctaatttaataccccaatctgcaattgatttttcaactcgagatttaaacgtagagaatgacaattcatcgtcttgatgcttgtcaatttgattaatgataaacacaacaggtattccaacatcatttatatgcttcataaacttaaagttaagttcagattgaacgtggttatagtcaaccgtataaaatatcatattacttgtatacatatattgttctgttattgactgatgtgatgcaacatttgaatcaacacctggtgtatcttgcaacgtaaacccattttcaaatttagctgattgaaaattaatttctacagattcaacgtcgacattttggcgattcatttcccttacttcatcataattagataatttggcatacgtttgattcggcaaattagcaataatatcgtgattgtctgaaactgacacaatagcagtattacttgtcgttggtacaggtgaacttggtaagatatcttgttcaattaataaatttatcagtgtcgatttacctgcagaaaaatgtccaacgaacgaacatgtatattgctgcaaatatactttcttaattacttggttaattgtatgtaaaagtgcttcatttcgcgacttttcaacttctttttttaatttatataaaagatctaattgttctttattaatcatgttactttcccctttggttcgttcacatagaaatgcttgcttgttacaacgaattcatacaatatcgatgtccatttaaacatagatcgttaaatggctcgcattgtattatgtttaaattttatcatagctgcttgataaaacatacgaataatcaattttcttcaaacattccaacttaaaagttcatttttctaaaaatcacaaatcatcgttaaatttttctagaaaataaatattgtcacagtttgttcacacacatcacagaattgacaccgtataatagccaattgggagggaaatatgaaaaatacatttaatccattacaaagattacatttctatgcagcaatatttattgctccactgttaatcactttaaccatttcgggcattggttacttgttctttccagaagttgaaaataatatttataagaatgagttttttggtgacagtgatgtaaaaacgcatcaaacattaaatgatgcagtacatcaagttgaacaacaatatgaaggattctttgtaagtaaagttagcatacttgatgaaccatataacaaacgaattacactgagtgatatggcaggaaatcaacgttacgtctttctagatcataacaatcaatttgttgcagatcaaaatgcgaaacatacgtattctaatgtgatgcgaagtatacatagttctttgtttactgaaaatactattattaattatttagtagagttaaccgcatgttggatgatattcatgattttatctggtacttatttactcattaagaagcatttaatttctaacaaaagtaaggcacttcgttggcaaaagtggcacgcaatgattggagttatcattgcaattccagtatttgtattagtcttaactggattgccatggtctggttttatgggcagtaaaattgccggtatgatggacacaaacggtgaccttggtcaaggtgaattagcgattaatccacctaaatcagatttgaacgaattaccttgggctacacgtaaaaataaacagccagcttcatccgaaaaaggttcaagtggtcatcatggtaatgcagcaatgcctcaaaccaaattagattatcaaatatctattgataaggtcgttgaacaggcgcaaaaagctggtattaaaaagccgttttcaatcgtatatccaagtgataaaaatggtacctttattgtatctaatactagtaattcaggtgttactgggctagatgtatcaccatacaaggaacaaacactttatttcgatcaatatagcggtaaaaagctaggtacgattaaatatgatgactacggtattattgctaaatggtttacatggggcattccgcttcacgaaggtcatttattcggcattttaaataaaatcattaatttatttgtatgtatcgctttattagtagccattggcatggggtttgtctcttggataaagcgtacaaaaaatactgcagtaaaagtaccacatcgcgtaaaaaaaccagcatctatatcactcataatatgtttaattgtattaggattattaatgccattatttggattatcacttatccttgtatttataattgaattaatattatatattaaagatcgtcgtgctaaacaataatgcacttaaagttttgaactgacgaaatttacaaaatgattctcgtctctctaattacttaaaacgggttctataataaatcgtactgatggaaagtttttactttttatctgtccgattttttgaatttgaagataaaaaagcatctaaaacgcataagaagataactctacttcttcaaaattacgttatagatgcttttttattaattcatatgcatgtcgtgaattttcatcattaaaccgtgtgggacgtcatcatgtttaacaatctcttgtttataaaatgtcttcccatcatctttagaaactaattttacaaagtctccttttttcggcttgaaatcattagatggttctactttgatattatgtttgactaatccatctttttcactgacaactttttctgcatttgtattactattcatataaccaaaataagtcgttttttgactagaaaaaatcattaaacatacaacggcaataccaataacaaccaatgcaatagataaacctagacccatttttttacccatttatagactcctccatttttcaaaaatacctattatcatgagaacttaattattactaattttagtcacgcattagaaacactttagttttcaatagttttacgttctgtctttttaccccagtattgataataagtacattctatatatccattaaataacttacgtcgctttgttgctttacgatctactaaatattcaaattctttattacttgttaaaatgtatgtagataaaaatggatgttgtttcattagtttaccaatataacggtacatttcttcaacttcttcacgatcaccaatacgttcaccatatggaggatttccaattaacgccaccggttcttctgtatcaattgttaatgtattgacatcttttacactaaatttaataatatcagacaacccaacttcttcagcgttacgcttagcaatctctaccatttctggatcgatatcagaagcatatacttcgatttctttatcataatcagccatcttatccgcttcatcacggtaatcatcataaatatttgctggcatgatgttccattgctctgatacgaactcgcgattaaaaccaggtgcgatattttgagcaattaaacaagcttctatagctattgtacccgaaccgcaaaatggatcaattaaaggtgtatcacctttccagtttgcaagacggattaaacttgctgccaacgtttctttaattggtgcttcaccttgtgctaatctataaccacgtctgttcaaaccagaacctgatgtgtcgatagtcaataatacattatcttttaaaatggcaacttcaacagggtatttggcacctgattcatttaaccaacctttttcgttatatgcgcgacgtaatcgttcaacaatagctttcttagttatcgcctgacaatctggcacactatgtagtgttgatttaacgcttctaccttgaactgggaagttaccctctttatcaattatagattcccaagggagcgctttggtttgttcgaataattcgtcaaacgttgttgcgttaaaacgtccaacaacaattttgattcggtctgctgtgcgcaaccataaatttgcctttacaattgcacttgcgtctccttcaaaaaatatacgaccattttcaacatttgtttcatagcctaattcttgaatttccctagcaacaacagcttctaatcccatcggacaaactgcaagtaattgaaacatatatgattctccttttatacaggtattttattcttagcttgtgttttttatacatttccaacaaatttaatcgctgatacattaacgcatccgcttactattttaaaacaaggcagtgtcattatatcaagacaaggcgttaattttaagtgttcttttcatgaaaaaagctctccatcatctaggagagctaaactagtagtgatatttctataagccatgttctgttccatcgtactcatcacgtgcactagtcacactggtactcaggtgataaccatctgtctacaccacttcatttcgcgaagtgtgtctcgtttatacgttgaattccgttaaacaagtgctcctaccaaatttggattgctcactcgaggggtttaccgcgttccaccttttatatttctataaaagctacgtcactgtggcactttcaaattactctatccatatcgaaagacttaggatatttcattgccgtcaaattaatgccttgatttattgtttcatcaagcacgaacactacaatcatctcagactgtgtgagcatggactttcctctatataatatagcgattacccaaaatatcacttttaaaattataacatagtcattattagtaagacagttaaacttttgtatttagtaattatttaccaaatacagctttttctaagtttgaaatacgttttaaaatatctacattatttgaagatgtatttgttgttgtattattcgaagaaaaacttttattgtcctgaggtcttgatgttgctacacgtagtcttaattcttctaattcttttttaagtttatgattctcttctgataattttacaacttcattattcatatcggccattttttgataatcagcaataatgtcatctaaaaatgcatctacttcttctcttctatagccacgagccatcgttttttcaaaatctttttcataaatatcttttgctgataatttcaatgaaacatctgacattttttccacctcattagaaactttgatcttcagaccactgtaagtcattgatgaatgctgttaattcatcgaacgtcacaatatcacaagtatagtttgttttatccataaaatcaactaacatctgcttgaagaacttaggactcgcctcttgttcctcatcataaatgagcaatgtttgatccgaatgttcaagcataaattgatctgcttgtttaaattgaaaaggaccttgatacgacgtatgaaaaatactatcaacataatctgcatgcttaattatgttggcatacttactttgattatgttcattccacttttctgtatgtccttggaacggtgtaattacagcaaactttaacgaatcatatgttcgttgtaattcaataacaacttctgcagtccataattctatacccatttgcccttgtattaacacccattctaatccttcatccaacagttgttcaattttatgttttataaattgttttaaataatgtacttcaggtgcgtcatctttaaaaatgtttaattcgaatgatttgtaacctgttacataaactgttttaaccatcagtaccctcttttgttacgccatctaatatattttgtaaatcatattgaacacttttaagcttttctataaataactttcgacttgttcgcttaaaatgacattcgacagaaagttgttcaatgttagcaatcagtagctcaaatttccttgaattcatataaggtacttctataataaattcacgatgtaatttgatctcattgagtatgctatcaatatgttcagtatatggctttacagtttggtaaaaatcatgatcttgttgttgtgatttcacattttcaaaattttgttgcatgttgttaacttcataaattagtgattcgactacatcattcatgaggacgcctcctacattttttaatttatcacaatatactgtattcgtcatgttttaacactctatataatttgatttaactattttttcaaatgtgttatctgttaaatcaagtaaatctaaaaacttcctatataaatacaaaattttatcgtgtatgttgttatacgatgaaaatacttttaatctaataaaatcatttaaatcaaatacacctctgctgattaacaacacatacttgtacttgcctcaaaaataaaaattactaatcatgatttgacttttataacaaaattcaaaaatattgtaatgagtattcatttttataagcaaaacttttcaattaattaaaattgtgtgtaaaattccaacattaacggtaaatgtattataatattattgtgttaatgctgaaatcacgttaaaataagctttggtgtattgtgtctttcgcatttatactaatttaagtttggtgtttcactataatgttgtgtataataaacaacgtttactaccaaacttgtgtggtgaaatttatgaattatccaaatggtaaaccatatcgtaaaaatagtgctatagacggagggaaaaagaccgctgcctttagtaatattgagtatggtggacgtggtatgtcacttgaaaaagatatcgaacattcaaatacgttttatcttaaaagcgacattgcagttattcacaaaaagcctacgccagtacaaatagttaatgtcaactatcctaagcggagtaaagctgtgattaacgaagcttattttcgtacaccttcaacaactgattacaacggcgtttatcaaggttattatattgattttgaagcaaaggaaactaaaaacaagacgtcctttcctttaaataatattcatgaccatcaagtcgaacatatgaaaaatgcatatcaacaaaaaggtattgtgtttttaatgattcgttttaaaacgctagatgaagtttatcttttaccctattcaaaattcgaagtattttggaagagatataaagataatattaaaaagtctataacagttgatgaaatacgaaaaaatggttaccatattccttatcagtatcaaccaagattagactatctaaaagcagttgataagttgatattagatgaaagtgaggaccgcgtatgacggaaaacaaaggatcttctcagcctaagaaaaacggtaataatggtgggaaatccaactcaaaaaagaatagaaatgtgaagagaacgattattaagattattggcttcatgattattgcatttttcgttgttcttttactaggtatcttattgtttgcttattatgcttggaaagcacctgcttttaccgaagctaaattacaagatccgattcctgcaaagatatatgacaagaacggagaacttgttaaaacattagataatggccaaagacatgagcatgtaaatttaaaagacgtgccgaaatcaatgaaagacgcagtacttgcaactgaagacaatcgtttctacgaacatggcgcacttgattataaacgtttattcggtgcaattggtaagaacttgactggtggatttggttctgaaggtgcctcaacattaacacaacaagttgttaaagatgcatttttatcacaacataaatctattggacgtaaagctcaagaagcatacttatcatatcgtttagaacaagagtatagtaaagatgatatcttccaagtatatctaaacaaaatttactattctgatggcgtaacaggtattaaagctgctgctaagtattactttaataaagatttaaaagatttaaacttagcggaagaagcttatttagccggtttacctcaggttccaaacaactataatatttatgatcatccaaaagctgctgaagatcgtaaaaacactgttttatacttaatgcattatcataaacgcattacagataaacagtgggaagatgctaagaaaatcgatttaaaagcgaacttagtaaatcgtactcctgaagaacgtcaaaacattgatacaaatcaagattctgagtataattcatacgttaactttgtaaaatctgaattaatgaataataaagcattcaaagatgaaaatttaggtaatgtattacaaagtggtattaaaatttatacaaacatggataaagatgttcaaaaaacattacaaaatgatgttgataatggtagcttctacaagaataaagaccaacaagttggtgcaacaattcttgatagtaaaactggtggtttagttgctatatctggtggacgtgatttcaaagacgtcgttaacagaaaccaagcaacagatcctcaccctactggttcatctttaaaacctttcttagcgtatggacctgccattgaaaatatgaaatgggcaacaaaccatgcgattcaagatgaatcttcatatcaagttgatggttctacatttagaaactatgatacgaagagtcacggtactgtatctatttatgatgctttacgacaaagtttcaatatcccagctttaaaagcttggcaatcagttaagcaaaatgctggtaatgatgcacctaagaaattcgctgccaaacttggcttaaactacgaaggcgatattggtccatctgaagtacttggtggttctgcttcagaattctcaccaacacaattagcatcagcatttgctgcaatcgctaacggtggtacttataacaacgcgcattcaattcaaaaagtagttactcgtgatggtgaaacaatcgaatacgatcatactagccataaagcgatgagtgattacactgcatacatgttagctgagatgctaaaaggtacatttaaaccatatggttctgcatatggccatggtgtatctggagtaaatatgggtgctaagacaggtactggtacttacggtgctgaaacttattcacaatataatttacctgataatgcagcgaaagacgtgtggattaacggctttacacctcaatacactatgtcagtgtggatgggcttcagtaaagttaaacaatatggtgaaaactcatttgtgggacatagccaacaagaatatccacagttcttatatgaaaatgtgatgtcaaaaatttcatctagagatggcgaagactttaaacgtcctagctcagtaagtggtagtatcccatcaatcaatgtttctggtagtcaagataacaacactacaaatcgtagtacacacggtggtagtgacacatcagcaaacagcagtggtactgcacaatcaaataacaatactagatctcaacaatctagaaacagcggtggattaacaggtatattcaactaatccactcaacataaaatcctcagttataccatatttatggtgtagccgaggatttttttaggttcttcatcttttatggtgggaaggtaaaacttcctgctttttttataagtattcatacgctattgctatattagtagaaaccgtaaaatcagtcattcacatacattttgaaacatctaaatagtttttcatattcacatctttagctatgtaaaattattgaatttgaataagtggttgttcccatttttaaaattatgattatattttctcatagtcatcttagacgctgttttaaattgatatatttattaattccctgtgtacgttaatcagtgaaatatcaacatgtttgcaacatattttcacaatcatagatataagaaatccacctacgattcgaaatagatatcttaaagcatatctcaagatatccattatgatgtagatggacagtttttatattaagacgttgtaatgacacgacacctaacataattataaatatgtgtgcatgaattagttttatatattttcaacattaggaaatgatcaatcttgtctatacctgcttattctttaaccttgtttgataactagcattcattttaatcaattcagttttaaaggtcttcatttgtcgatagcccataaaatgatatttacgttcaatcatataatcatatctttctttaaaattcattggcacaacaggatattgatttaatttatcaaaatcaatattgccagttatgtcattaacctgcttaaaataatcaataattttactatggtattcatccaagtagggctttgcttcactagaacctaatgtcttatttttggcaaataaatcaatctcttgttctaaattatcaaatacctcttttgtaatatttgtcatgttatcacgcttctttcaaactagctttataacgtttttgtccttctctacaatcttctaatagtggacaaatatcgcatttaggttttcgggctaaacagtggtatcttccaaagaaaatgagttgatgatggctcctattccatctatctctaggtatgacagaacataaacggtcttctacctgtctcacattatctttccaacgattaatacctaagcgtttagaaacacgttctacatgcgtatcaacagctaatgaaggttcatcaaatgctacactcatgactacattagcagttttacgtcctacacctgctaaactttctaattccttatgtgtttgtggtatttctccattaaattgatcaatcaaagattgacaaagtttcttaatattcttagctttgttacgatacagaccgatagaacgaatatcattcataagttcttcatcactgactgccaaataatcttcaggcgttttgtattttttaaacagctcagttgttactctatttactagaacgtctgtacattgcgctgacaataatacagcaatagttaattcgaacggattatcatgttttaattcacattctgcatccggaaacatatttgctataacatcaatcatttctaatgcttttttcttacttaccatcaaggttctccccgtttaaccaatcaaatttaggtaccgttttaactgtgtgcgtcattttcggtttattgaatttttctcttatttttctagaatcgtcaattgttttgacattgtttttcttccaattaagtaaaatacgatctatatatttaaagctaagtttattcaaactattcgcctcgtctaatgccgcttgtataattgcagtatcgtgtttatcaacatcaatccattgatttaacgtttctatttcatatggagataacggccttgcaaatgtatcctctaaaactctaaataattgtttaaatttttctttactatttagctctttcgtttccatactttgttgcttcaatatatgacttaatttttcgaaaaaaggatctagattcatatattcggtaaatctaccttcttcatctttttgaacttgtaattctagcaattcacgttgtatcaaattttgaataaccattgtaatatcacgtggttgcatagttgagcccttctgaagcaattcaattgaaggctgtttatttgatgtttcggaagcataaatcaatttaagcaaaatgactaaatcttgctcatctaaacctaagtcactgtaatggtctaataattctcttcgtatcactacaggtcttgcttttaattgatatttatccatgttcgtgcccccttttaaatttaaccattacttaatagtataaatcattttctttaattttcgactaaaatgcttaatatatttaactagtagcaaacaaattttaaataacagtattttttaacactagattttaacaatgaactttatggataatcagatgaactatttattttccaaatatagttactaaacaaaagtttgttcatgattaatataagccgttatcaatcttcattttccaagaataaatcgcccagctattaatataggctggacgattctttttattatcataatatatattttaagtaacgaccctaaaacttatggatataaacggtttaataatcttgggaatggcgctgtttcacgaacgtgttcaacaccagaaatccatgctactgtacgctctaaacctaaaccaaatccacagtgtggcacactaccataacgacgtaagtctaagtagtaactatatgcttcttcgtctaatccatgttctttaacgcgttgttctaacaattctaagtcatccacacgttcagatccaccaataatttcaccgtatccttcaggtgcaattaagtctgcacataatacagtttcttcattttcaggatttggttgcatatagaaaggcttaattttagttggataattagtaataaacaccggtaaatcataatgattagcaatggctgtttcatgtggcgcaccaaaatcttcgccccattcaatatcatcaaagccttctgcttttaagaattcaattgcatcatcatatgaaattctagggaatggtgtcgcaactttttcaagttttgatgtatcacgctctaaaattttcaactctagtttacaattttctaaaactgattttacaacatgtgttacatattgttcttgaatttctaaactttcagcatgatttgtgaaagccatttctccttcaatcatccagaactcgatcaagtgtctacgtgtttttgatttttcagctctgaaagttggaccaaatgaaaatacttttccgtgtgccattgctgcagcttctaagtataactgaccactttgagataaaaacgcatcttgatcaaagtatttagtatggaataattcacttgtaccttctggcgcacttgctgtcaaaattggtggatcaacctttgtaaatccatctttgttgaaaaattcatacgttgcacgaataacttcatttctaattttcattacagcatgttgttttttagaacgtaaccataaatgacggtgatccattaagaattctgtaccatgatttttaggtgtaatcggatagtcatgcgcttctgaaataacttcaattgatttcacttgcatttcgtatcctaagtcagaacgattatcttctgtaattgtgcctgtaacgtatagagatgattcttgagtaatttctttcgcaagtttgaatacctcttcatcaacttctgatttaactactacgccttgcataaagcctgttccatcacgtaattgtaaaaaggcgattttaccacttgaacgtttatttgttaaccaagcaccaattgtaacgtcttggtttaaatgatctttcgcttgtttaatcgttgttttcataaccattctcctatttattttttcgttatacaatactcattcattttaacaaaatccgctttcaagttctagaactagactaaaagataacgtgtaaatggtaatgatttacgcacagatttgaacattaatttatattaagacaatacaatcatcagtttcagacaaaatatataataaagcctcaatattattagtatgaaggtcgttttttgtgctaacattcaagtttaattataaaactcaaattttgacgaccaaacaaaaattcttgtaacagaacatagcacatgtcatgtcacaagaattttactttgtatttcactttttctttttttgaatttgtcttaataattttccaaactgttgaatgtcgccttttttctgacgataattttcaagtgtttgttcaaaaaagtttttataattactgtttatgagtcgatcatcaaatgaaactattatgccgcgatcattttcatttctaattaatcttccaagtccttgtctaaaacgtgtaactgcatcaggtaatacatattccttgaaagttgaagtgaattcagaatccataagccaatattttgcattatgcttgttcataaacggtaacttcgctatcatcacacatttaataccatttgcttgaaaatcaaaaccttcaaaaaatgttgacgtaccaagcagtatggccttatcaaaattattaaactgttgtactattttataattttggttctgctgttgtgttaatacaacataatcttcaaattctggcaattcatttagcatatcttgtaccatatgcatcattttataactcgtaaataagactaaacattttgatgacgttatagtcgtatattcaataatatagcttacaatcgatgctacatactcatctatatttttatattgataagatgctacatcactcggtataaatacacttgtattttttgcactttgtaacgacgtgttaacttcaaatgtattaaagtgaacatctttgttgaataactgtttaaaagcttcaaacgaatgattaaattttaaagtaccagatataaaaatgagtgatttaaatttttccaatacttgtttcgttaatacatcttttacagcgtaatctttcacatataaacgtattgttgatttttgagataaatttttaatcgaaatgaaactagtatgtccagcttttaaactttgttcgatatttttaaatttatcttttaaatacaacaactgtttccgtaatgatttaactgttttatgactaatgccattgaatatttctagcgttttatttaacttatcgataatcgcatgtaaatccttcaaaatgtcttttgtttcaaaagtaaatacattatggaagcgatgaatatcatcatcataaacatcagaatcattgataatcgtaaatatcgttgagaacaattgctcatttaactcatgaatctcattcatactagccttcaagccaaaaatatcaattggtgcaatatctaatttttccaaaattcgctgcttttccagttgatcaattgcctttaacaatttttcattttcgtttttaccaatcaaaccaagctgatatttaatatcagcataactcaactcatttgtcacttgatttaaggcatagtctggtaagcgatgtgcttcatccactatacaatcatcaaacaattgatatattgaattttcaacatcagaatgaattaaatgtgcatgatttgtaataccaatttgaatgttctgtgcatttcgcttaataaaattataataatgaacatcgtgacgtgccggtacatatgtttcaattttctggtcaaaatacatcttttgaccaccttttaaatttaattcctgtatatctccggacggcgtctctgtaatccaaatcagcaattgcattttcaagatattcacttcgtaattacttgtgtcatcttttaaaatttgactaataagccccaatgaaatgtaatcacttttacttttaatcaatagtgcattaattttaaaattcaacgcttcattcattgctggaatatctttttctaacaattgactttgcagtaatttagtattggtagaaatcatgacatgcttcccagtttcaatattatacatcaaggccgcaagtaaatatgctaatgatttaccactgcctagtgatgcttcaatcattgctttttcactatgcatgagctgatctaatatagtttccgctaaatataattgttgcggtcgatatgttaagccaagttgatctacagctttgctatataaagacttcaagctgccattataatttgttgtcggctttttaaaatcaacttgcttacgatagataatctgttcgaacttttcgtacgatttatccaatggctttgcatcatattgcctaaccatctcaaagaaaatatcatacaaatcgtatttcaactgtttacttaaataatataattgcttcaaagtatctaacggtaacttttcaaatttttcaaaagctaatatcatcaatttagcagtagtagcggcatcttcgtcagctcgatgggcatttgctaaggtaataccatgtgcctctgctaattcacttaattgatagcttttatctgtaggaaaagctattttaaagatttctagtgtatctataacttttttgggacgatattgaatattacaatctttaaatgcctttttaataaaattcaaatcaaaatctacattatgagctacaaaaatgcaatcttttatcttatcgtagatttcttgtgcaacttgattaaaatatggcgcttgttgtagcatattttcttcaatggatgttaacgcttgaatgaacggcggaatctctaaatttgttctaatcatagaatgatatgtatcaataatttggttattgcgcacaaacgttataccaatttgaatgatatcgtcaaaatctaattggttgcctgttgtttccaaatccacaacggcataggttgccatacccatagctatctctccttgctttagtgttaaaaatctatatctgcactaattaaacggtgtgattcacccgcttcatctctaacaattagatagccatcgtaatctaaatcaattgcttgtcctttaaactgtttatcattttctgtaaatagcaacgttctattccaaatattagaagctgcagtatattcttcacgaatttcagaaaaaggtaacgttaaaaattgattatatcttttttcaatttcttgaagtaatatctctaaaaattgatatctatctaatttatttttatcatgtaattgtatacttgttgctctatgtctaatactttcatcaaagttttctagttgttgcgtcaaattaatacctataccacatattattgcttctataccatcattattagcaaccatttcagttaagaaaccacacactttaccattatcaataaatatatcattcggccatttcactttgacttcatcttgactaaaatgttgaatcgcatctcttatccctaatgcaataaataaattaaatttagatatcattgagaatgcaacgttaggtcttaacacgacagacatccaaagtccttgcccttttgaagaactccaatgtctattaaatcgcccacgacctttcgtttgttcatcactcaagataaaaaatgaagattgatttccaacaagtgactttttcgcagcaagttgtgtagaatctattgaatcgtatacttcactaaaatcaaacaaagcagaactttttgtatattggtctattataccttgataccaaatatctgggagctgttgtaataaatgccctttatgatttactgaatctattttacatccctctaactttaattggtcaatcactttttttactgcagtgcgtgaaatattaagtgattccgcaatgctttgtccagatatataattcggtttatttttatagagtaattgaagtacatcttgactatattttgacatgattatccacccatttcaaaatttcagtttcttcgttgcttactttacctgttacaatcgctatctcaatttgtcttagcacatcttttaaccacggaccacttttggcatttaaatgtgccataagtacaccgccattaaccatcatgtcttttctattatgcataggtaaacgatgtaatgtttcatcaatcgtttgaaggttaacgattaatggttcatgtccttgaatatcatttgcctttaacacgtctgctgcaaccattacatttttaatgagatgcgtatcataatcataaacaaacatttttaattgttcttttgtaataatacttggtaatgcattcataatttgaatatattgattgatatcttttacttgtcggttacttagctttaaaggcttcaatgagtaattaatatcaaatttaactgatactatagcaatcaacaattctaaatcaattgcttcagttacattaatttgattcatatcaagatgttcgaaatacggcatataattaaatgctttcagcgattttaaatgattaaaactcttttcaacattaatacctcgcattaatttagttagttcaatcactatacgctcaattgataaaaatttaatatctgccatttgtatacgcatcgcttcgaatgtttccgttgcaatatcaaatgataattgtgactggaaccttaaacatcgaatcatacgtaaagcatcttcttggaatcgttcctcagctatacctacagttcttattattcgattattaatatcttgttgaccatcaaaataatcatacaatttgtatgctgtatccattgctatcgcattcatcgtgaaatctcgtcgttgcaaatcttcgtataaatcacgaacaaatgtaacaccacttggtctacggtgatcgacataatcttcttcagcccggaatgttgtcacttcataattttcatcattaaaaactacatttatcgtgccatgttctttacctacaggtatcgtatgactaaagatagattctatttcatccggcgttgcacttgttgtgatatctatatcatgaatatttcttcccatgacataatctcttacagagccacctacataatatgcttcaaaaccattgtcttgaatttgttctaatataggccttgcctgttcaaataatgatttatccatattattactcgcctttacttttgttatgctcatttagcattttttgataataatactcatattgatctgtaataagttctgatccaaaacgttcagcaatatctgctagcatgtttttctgaagtttgttgtataacaccttatcttcaagtaatcggatagcatagtcactcgctgaatcacaatcacccacatctacgacaaatccagtttcaccatgtttaataacctctttaattccaccggcatttgaaccaattggaacgacgcctgttttcatagcctcaagtaaagttagtccaaagctttctttttcacttaataataatactaagtcagataattggtaaaattcacttacgcaatcttgtttccctaaaaataaaacatcctcttctacgtttaactctttcgtcaattgacgcattggcactaattcaggaccatctccaagtaaaattaatttactaggtatcttttcacgtacttttgcaaatgtttctataatagtatctatgcgttttacttgtctaaaattcgatacatgtattaacactttttcatctggtgctataccaaattgtgattttaatgctgtgttatgtttagttggaaactcattttcacgtacaaaattataaatcggtataatttctttgttagtttcaataatttcatgtgtttcttgtgctaaagatttactcacacttgtcacaatatcacttttttcaatgccaaatttaattgcaccttggagtgaatgatcatagcccaaaacagtaatatcagtaccgtgtagcgttgtcataatttttatatctttacctgacatctcacgagctaaaatcccacaaattgcatgaggtacagcatagtgcatatgcaacaaatcaagatcatattctttaataacttcagcgattttagtacttaacgtaatatcatacggtggatactgaaatactgcatattgattcacttcaacttgatgaaaaatcatattcggtaatggttttcttattctaaacgggatatttgaagtgataaaatgtacttcgtgacctcgctctgctaatttaattcctaattctgtggcaataattccagaaccacccatggacgggtaacatgttatacctatcttcattcgcttgcccatcctttctttctatttctctctattattctcgatgcgtagataattgtttaaatttaagtttatagtaatgttgagtttataatttcatatatctaaaaacaggtgttgtatatataatcattcatctagttatacttactttaaaaataatataatttcatgcgatgcaattcattgatggatgtttttaatcttaatcaaatccaaataaagcatatatttttaaattcactttctttcgaatcgatttttatctcttgtattaaacttttccattgtttcattaaagctctctgtcatatctattcccattgaattcgctaaacataacaacacaaataaattatcacctaattctgctttaatcgtatttgcttcctctgaatctttcttctttttttcaccataggtatgatttatttcacgtgcaagttcgcccacttcttcagtcaatctagctaagttagctaatggtgaaaaatatcctgttttaaattgtccaatatattcatcaacttcacgttgcatttctaccattgatttcatttctacgttctccttatattgcatttctaatatagtatatatcaatttgaagtctcatgcatgtttagtgcaatctactgactctagctaaactagatgacaagttgtttattttagaagtttaataattcagtttatataaatgtaatgcattcctaactaaattaaatcaattgaaattgggattataactttatgatacgtaccactacaataaaataatatagtgaataatctaccattagaaaaataagcacaaaaaaactagcaaccacacaaaaatgtgattagctagttaataagtgtctaatttaagttaattgttaatctataagattaatcacttgaacgcgcaatcaaaataatacgtacaagctctgctacagcgactgcagttgctgcaacataagtcattgctgctgcagataatactttacgcgcatgcttgtattctttttcatttacaatgttcaatgccgtaatttgtttcatcgctcttgaactcgcatcaaactcaactggtaacgtaacaattgagaataataccgctaatgacattaaaccagcaccaatccataaagcagttgaaccaaatgcactacctatcgctgttaagataatacctaacatgatgatcatataacttaatgaactccctaggtttgcaacaggtactaatgctgctctgaatcttaagaaccaatatccttggtgatcttgaatggcatgaccaacttcgtgggctgcaattgcagttccagcaactgatggtctgtcatagtttgcaggagatagtgaaacaactttctttttaggatcgtaatgatctgttaagaatccttcacctttaacaacttcgacatcataaataccgtttgcatgtaaaatttctaatgcaacttcacgacccgttttaccactagttgatctaacttgtgaatatttctcatagttagatttaactttgtgttgtgcccataaaggaagcaccattaatattacgaaataaattatcatagtaaaaattgaagacaataaactcactctcctttataaatattttactgtcatttgccgtttttatcaaatcatttacactttaataatttgtttaattcaatataaagcaaaagtccaaaaacacttagacaacatgataatacaccaatttgccacacatgtgtagttataaaatcataatatggaaattgaaggtgaaaatagtcaatataatcattcaaaaacacccaaatcatcgctacactgattccaatcatagaacgtttaaacctaggatagaagtaaattgcctgaacagccattatactgtgggaaaacattaataccaaaccatttactgtaatatcaccttgttcaataataaataatatattcattataactgcccaaatcccatatttgaataatgttacaaatgccagtgcatcgataatactattttgtttttgaattaatatcaatgagatagaaataactaagtataatattgcagttgggctatctggaacaaaaatcttaaaatgccagggcgtatgacttaattgttcaccataccatatataaccataaatcatccctaatatattacaaatgagtagcatcattaaccaagaacgttgataaagtgtatattgccaaaatgctttaattgtcatctgctaagtcctcaaattgattatgtttatttactagcttgagtgtatttaaaatttgcgttagttgataaaaacgttgcttttcattcatctgtaaacttaaatcaatattgtgtaacaagtaatctattaataacgcatgtttatgccgatctatagccatactatttaagtcatgaagataagtttgataactgggcgattccgttagttgagcaactattaaatcatctagcctttgctcacgctttgacacgtttgcgaagtgaatttgaatatcaaaagcacagttatgattagcgatataatcaaatatttcatttgtattcattaactttatattacgcttagtaaattgaattgcagaagcgtgacttcccacttctgcaatttctaatgtttcatgatgattaatttttgtatctacaaaatgaatgtttgccaatttcgcctcattcacttttatatagttaagcacccaaactgcaatacgcgacttaaatcgatattgaaaaagtaaatattcaataaaactttctttaatttgattgagtgtctctgacatcaaataccccattttaagattgcaatcttgataattcgtcatgccaattttcgttacttggctctagttccaacaattgatttaaaatagtaattgcttgttccttttgaccaatttcaattaaatagaaataataatcactcataaaatcaatatttgttttcatcgttggatatgctaattcaaagaaatgttgagcttctttatctcgctcttcttgaccataggcgaacgctaaatgccacatgaatgtaggatccaaatcttcttcatctacatatgttaataattcaatgattgcttcataatcttcttcattacgatataaatcgcttaaaatcaataaaggttcttggtaagcattatcaacctctaatgcttgttttaacaataatacaccttcattagcatcgccgtgttctatttccaaacatccagttgtatacattaactctttataaaattgacttagtcgtaatccttctttacccgtttcaatggcatctggataatttttttcattttcatataatgattgtaaatacaagtagccttgaatataatcaggatctttagaaagtaatgtagtcattattttaattgcttcttgagtgatgtcatttttatcgtaagaaatggcttttttgagataatcttctgaagtcatttcatcttcattaatttcatcgtataagcgaatcgcatcactatagttaccactttgtaaactacaatctgccatacgagagaataagtttacaccattaacttgatattcaccagtttctaaaacggtttcgtattcagaggtagcacgtaaatattgaccatcataatataacatttcagccaatgcaaaatggattattggatcatttggctctagttcaagtgcttcttgtaatttatcaatagcaacttccatcatattaatttgttgatataaatctgcttctaacatcaacttttcaggtgatggttcaacataacttaaatattctaacgcttcgtcagtttgattttcagacattaaaccttcaataaaataaatcagcaattcactttcgtctggatatttgtgatataacacgcggaatacttccaaaccttgtggcattaatccaaaattgtaaagtgtctctcctagaataaataatgcgtcatcgttgtcagtagttattgcttcattaacacgagagtctaaattttctagtttttgtagattgatatcgtctattaatttatagatatcttccattttatattatccctcattttctaaaagctttagttttggtaaaaatcctggaaatgatacatttacagcatcaaattgtttgattttgacaggctcgcttgaaagtagagaagcaactgcaagcatcattcctattcgatgatcagttaaactatcaactgttgcatttgttttaaattctgacggatgaataatcaatccatcattagttggttgtaattcaaaccctaacaagtttaacatatcagccgttgtatcaattctatttgtttcttttacttttaattcctcggcatctttaattgtactcgtgccaactgcttgtgtacaaagtaatgctattacaggcagttcatcaattgcttttggaactaattctccttcgattgttattggttgaagcattggtgtgtattgaatacgaatagaagcagtaggttcagcaccagttgtttgattgaaaagttggatattaccgcccattttttcaacaatatcaataatacctgaacgtgttggattgattccaacattatgaattgttacatcacttcctggtgtgataagtgctgcaacaataaagaacgctgcagatgaaatatcgccaggaacatgaaaatctgcaggtttaatgtatcgaattgcttcaggggttgtattaattgataacccttctgcttcaattggaatattaaaatgtttgaacatcgtctcagtatgatttcgacttacatctaattctttaatgatggtcggttccttagaaaacaaacttgcaaataaaatggcactttttacttgtgcacttgcaacttccatttgataatttataccttttatgacagatggcttaataattaatggtgtataattatcttcaataccttcaatattcgcatccataagtttcaatggtctcaagacacgatccattggccttttaccaattgaaacatcgccagacaaaacactttcaatacctaaaccacttaacaaacctgccaataatcgtgttgtcgtaccagaattacctgtatacaatacttgatgtggcgtgttaaaagattgatatcctggggaagtcacaactaatttttcatcatcttctttgatttctacacctaacagtcggaaaatgtccatcgtacgacgacaatcttcgccaagtagtggcttatatatagtagatacaccttcagctagcgacgccaacatgattgcacggtgtgtcattgacttatcgcccggcacttctatttcgccctttaacggacctgaaatatcaatgatttgttcatttaccatttcattcacctacttaaaatatgtttttaattgttcacatgcatgttgtaatgttagttgatcaacatgttgtacaacgatatctccaaattgtctaatcaagaccatttgtacaccttgcttatcattctttttatcacttagcatatattggtataacgtttcaaaatccaagtcagttatcatgtctaaaggatagccgagttgtattaaatattgaatataatgattaatatcatgcttagaatcaaacaaagcattcgcaactataaattgatagataatgccaaccatcactgcatgaccatgaggtattttatgatagtattcaacagcatgaccaaatgtatgacctaaatttaaaaatttacgtacaccttgttctttttcatctgcaataacaatatccagcttcgtttcaatacctttagcaatatatttatccataccatttaatgactgtaatatctctctatctttaaagtgctgttcgatatcttgcgtcgctgattcaccattcaataacgcatgcttataaacttctgcatagccacttaatatttgctcaaatggtaacgtctttaaaaagactaaatcataaatcacagcagttggacgataaaatgcaccgataaggtttttaccttgctttgagttaatacccactttaccgccaacactagaatcatgcgctagtatagtcgttggcacttgtataaagtgcacgcctcgtaaaagtgtcgccgcaataaacccagcaaaatcaccagttgcaccaccaccaacagcaataattgctgtattacgagttacatgatgggataaaatatactctaatgtttcttgatattgctcaaatgttttcgtcttttcaccagctggaataataactttatgtacattttcatatgataaaatatcatcaaatttatcagcaaaatattgatttacatgctcgtcaattaatataaaactttgatcaaactgatcaatatacgtgctaatatggtcaattgcaccgtgttcaacatatattggataattatttgaagggtatgttgtttgtaatttcatgattacacctcaattgttcttgttgttaaaactcaatatttaattgtctgcgctcaataatttgttgtttaagttgctcaatatgatttgattggaattcttccaataatgcttttgctatttcaaatgctacgacatgttcgcagacgatacttgctgcaggaacagcacaactatcagaacgttcaattgttgctttaaagtcttctttagtattaatgtctactgaatttaatggtttatataacgttggaattggtttcattacaccattaacgataattggcattccatttgacataccgccttctaaaccacctaagtgattagatccacgataataaccaatttcactattatatagaatttcatcttgaatctcactacctggcttttcagctgctttaaatccttcaccaaagcttacacctttaaaagcatttatgctgacaacaccttgtgcaatcttaccatctaacttacgatcataatgcacataactacctacaccaacaggcatattttcaactacaacttgaacgacaccgccaattgaatctccttcatttttagcttcgtcaattttatctcgcattgcttgtgcgatactgtcatcaattacacgaacatcattacgatcaagatttgctttaaatgtttctgaatcataaaaatctttatctttaattccacctatttcaacaacacgactgtatatatcgatatctaactgttgtaataacactttacataaggcaccgactgcaactcgagctgctgtttctctagcagatgatcgctctagcacatttcgtaaatcacgatgattatatttcatacctccaaccaaatctgcatgaccaggtcttggttttgtaatagtacgtttcatattttcacgttcttcttcacttattggagctgctcccataatttttctccaatgcgtaaagtcatcattggttacaaccatagtaattggactacctaatgtataaccatttctaacgcctgatactatttctactgtatctttctcaatttgcatacgacgtccacgtccgtaaccgccttgacgcttaaacatttctttattaatatcctcaaccttaatttctatatttgcaggtacaccttcaacaataactgttaattgaggtccatgtgattctcctgatgttaggtatctcatacacactcgctcctttcatacttccacgataacattataatatgttgttaatcttatcatattcattgtgcattcataaatgtttgttttcaagctcaattaagaaaatggatgacatctcattttaaatgtcagaattatcttaatattaaacgaactaaaattaattataatatattcgtctgtagaaaagtatcatgaatttctaaacagttgcatcatataatcattaattaaaaatgattagccgttttaatataatcgtatcgcaactttagcaaataatatactgactacatttcttaatacaaaagaacgaactgttaattattaataaagttaatcagtccgtttaaaaaaattatgatattaaaatatacatatgttaagcgcttttgttatactttgacttcaaaaatataatcaattcttttactaatacataaaaaatataaatgagagtcagtataaaaataatttttgttataggattaagtggtttatctaaaaatatagcaccatatagtaattccattaattttaagaacattaaaatccccaaaataatcgaaataatattcttcattttaacaaccccttctctctgtttagtttcatttgataaagaatattcctctctttttaatacgtgttaccaaaaaactataaaatttttcaagtaatttactacaacataaaaaacgggccttgttatgtataatcataatgactaaccacataacaaaaccctttctacctttataaataaatcgtaaaggtttacagtttatattttattcatataaccatgcatcacgtggtgaagcatagctagtaatttcattttcattaaaccatagattaatttcacgttcagcagactctaatgaatctgaaccgtgaatgatatttctaccaacagttaaacctaaatcacctctaattgatcctggtgaagcttctgaaggattggtgctgccaataatatgtctagatacattaactgcatcttcaccttcaactaccattgcgaacactggtgctgatgtaataaatgaaattaaatcattataaaatggtttaccttggtgttcaccataatgtgtttcagcaagttccattggtacttgcattaatttaccaccgacaagttttagtccttttctttcaattcttgaaattacttcaccaattagatttctttgtactgcatctggtttaatcattaaaaatgtacgttccactttatgtatccccctgtgtttaataggtttatgtatattactattatatattaacaggttggtaaagcgctttcaatacttttcataaatactacgtgtttcttgaacccatttttttcgtcaaacttaaaagtagtgatttcggatgtccatctggtaactcagaaatcaaattcaaagctttacttaaatacttcgaacttactgccttagcctcatcgatgctgtcagattttctaatgatttggatacattcttcaaattctttgcgttcactatcacgacgtaactgttcgattttcaatttgaagtctggatttttacgcatttctaataaaatcggtaacgtaatatgaccattaagcaaatcacttccgaccggcttacctaatttcttttcggtacttgtgaagtctaatacatcatcaatgatttggaagctcatacctatataatgaccaatcattttcaattttcgtacagtctctttatcagattgagaagtaattgcaccaacttcagttgatatttgaattaacagtgctgttttgcgattgatacgtcgtaaataattaataattgtctgttgactgttaaattggtcttgaaattggaaaagttcccctctacaaacatcaacgatagattcagatatcaattgatgtacacgattatctttaacggccattaagtgttcaagtcctaatgccaataaaaaattcccagttaaaatagcagttgtctgatcccatttctttgatatggttaacttgcctcgacgcttgtcgcttttatcaataacgtcatcatgaacaagtgttgccatatgaattaactctaatgcgactgcaacttgatacgtttgttcagacgtttgttcatctttgccaaattggctactcagaataacaaatgctgggcgtactcttttaccaccagaagacaataagtgtaatgatgcctgttctaatacagaatctttactttttattgccttttcaagtcgttgttccactttcttaatttcattgttcatgtttaactttgccacgttaatcacctttggtattatctttttctttatagccaaggtgcattgcagcaacgccccctgtaaaactacgtactcttacatttatgaaacctgcttcttcaaacatgcgcttcaactcttcttttccaggaaaattaaacgtagattgctgtaaccattcatattcttcttttgattttgcaaataattttccaaaaataggcataacaaatttaaagtatagtgcatacatttgtttaaagactggcaaagttggttggctcgtttcaagacataccaccataccacctggtttaagtactctattcatttcttttaacgcgactaaatagtctggcacatttcttaatccaaacccaattgttacataatcaaaagaattgtcttcaaacggcaattccattgcatcaccatgaacaagtttaacattttccattgaagcagttttttcttttcctacttctaacatattctcactaaagtcaataccagtaacttcacctgttggtcctacagctttgcttaatgcgattgtccaatcaccagtaccacaacaaacatctaatgctttcgtcccttttctaacacccatgtctttcatgacgcgttttctccatactttatgctgctcaaaactaataatattatttaatctatcatatttttttgaaatattttgaaaaacgcgatgtacttgctctttatttgctttattgtcagccatgcttaattacctctactttttaaataacttttttggatatcgtgtaagtaatgctttacttcactttgattatatttcttgaagtatgatggatagtaatcagacatatcttcaaataaataattatatatttccgactcatcaatattgataccgaaatgagataacgtaatatatgggaaaagtgtttcaatttttactattgcttgagaaatttcataatcatttaaagcttgatgatgtaatgaagatttcaattcattaatttcaacaattgctttactaatttcattttgaaatgataaatcattgatttctgctagtagcgtataaaaatgtgcactaattaaatctccaatcaaaatggaatgtttagacaaatgattatatgtaatgtcatcaaggtgtctcattgatgtgtcaattgtgaggcatgccactttggcaacatctggaatatcatataaatcaagtaacttacctaaccgatgattaatattaatggattcatattctgatacgccctttaatctttcttctatttgtctttccaatttgctaacagttgtttccatgtctacacctcacgatattatcactattcatattaacattatatgtaagaaattaaaatcttttgaagcattaagattacttatcatttttaaatttcaatttaaactaacagtaatttatgtagcttttgtaattctcataataacctttacttcatttacattattcatctttttaaataacgtaaaatactatagtagacatggttaccttttaagtaaattcaacgctaacaattaatctcaatattcatatgtatattttgtagttgctatttttatcaaaactattatgtcatgtaatattttgaacgcttaaacaatgaatgttccaaagattaaaaacttagaagaacattacaatttatgtacaggttgtaagtattaaaagcaaaataaaaagcccttattcagggctttttaagtaaaattattttacagcatcttttaatgctttaccagctttgaatgctggaactttacttgctgggatatcaatttctttaccagtttgagggttacgacctttacgtgcagcacgttcacgtacctcaaagttaccgaaaccaattaattgtactttttcacctttagcaagtgagttttggattgattcgaatacagcatctactgctgaaccagcttcttttttagttaaatcagcttgctctgcaactgcattgattaaatctgttttgttcattagacattcacctcctgaggtttgataatgatatgtttatatcattatggtaaaactttaacacaagcattacataaatcgcaatcatttatgtggcaaaaacgttgaatttaagccatttctattcattttacgtaattattagccgtatatgtgtaataatacacattttattcagattttttatcgcgctccattaaatcttttacgcattcttttactgagatattttcaaataatactctatataatgcatttgtaattggcatatccacatttttttctttagctaaatgataaactgatttagttgtataaataccttcaacaaccatattcatttcagataatgcttgatccattgattcaccttgtccaagtttatatcctaatgtgaaattccgagaatgtgttgatgtgcaagtaacgattaagtcaccgataccacctaaacctagaaatgtcataggatcggcacctaacttttcacctaatctactaatttccgctaagccacgagtcattaatgcagcttttgcattatcaccgtagccaattccagctacgataccacttgctactgcgatgatatttttcaatgcaccaccaagttcaacaccaatcaagtcatcattcgtgtacacacgcaaataatcattcataaataaatcttgcgttaatttacttacacttttatcttttgatgaagcagcaactgtagttggttgcttgactacaacttcttccgcatgacttggccctgacaacacgccaatacctgcattatattcaggtgaaatagaatcttcaatcatttctgacacacgtttaaacgtcccattttcaatacctttagcaacatgtataaaagtctttttagaggtcagcttatcattaatttgagaagcaacttctcgcattgctttagtaggtaaagccattaagtaaatatctgcaaattgaattgctttggtcatatctgaagtagcgatgatgttaacatctaatttcgcgtattttaaatactttttatttgtatgacatgtatttaattcatcaacagcatcttgatttttaccccacatcaaaacatcatgtccattttctgcaagaacattggcaagggctgtcccaaaacttcccataccaaaaacggtaattttagtcattgttatcccccaatcgttaatttctctttcgagctataatatgaattggtgtaccttcaaaaccaaaagcggcacggatttgattctctaaatagcgtttataagaaaaatgcattaattctacatcattaacaaatacaacaaatgtcggtggttctatagcaacttgtgttgcataaaagacattcaaacgtctacctttgtctgttggtgtagggttcatggaaattgcatcagtaacaacttcatttaaagttgaactttgaacacgttttttatggttttcacttgcttcattgatgtaagggaataatgtacgtaatcttgtgcgttctttagcagacacaaaagcaatttgtgcataatctaaaaattggaattctttacgtacttcatcttcaaatttcttcatcgttttactatctttttccacagtatcccatttatttacgacaatcacgactgctttaccttgttcatgtgcatatcctgcaacacgtttatcttgttcaatgatgccttgttctgcatctatgaccactaaaacaacatttgaacgttcaatcgcttttaaagctcttaatactgaatatttctcagttgattcatatacttttccttttttacgcataccagcagtatcgattaaaacataatcttgtccatcataactatactctgtatcaatagcgtctctcgttgtccctgcaacattagaaacgataacgcgatcttcacctaaaatagcatttactaaacttgatttacctacgtttggtcgtccaataatggatagtcgaattgtatcttcatcataaggatcttcttcctcttcaccaaaatgagaaacaactgcatctaacaagtcaccaagacctaaaccatgtgaccctgatatcggatacggttcaccaaatcctaatgaatagaaatcatacacgtctgtacgcatttccatattatctactttgttaaccgctaatacgaccggttttttagatttgtataaaatttgagcgaccatttcatcgctttgtgtcaatccttcacgcacgttaaccataaaaataataacatccgcttcatctatggcgatttctgcctgcgctctaatttgtgtttggaatggtgcatcaccaatttcaataccacctgtatcaataatattgaaatcatgtgttaaccattcacctgaagaataaatacgatctcgtgttacacctggcgtgtcttccacaatcgaaacacgttctccaactattctattaaaaattgtagatttacctacattaggcctacctacaatagctactataggtttagtcataagctaacttcctctctttcttatatctttttaataatatcacatgagactgtgtattcaaaatgagtttattactgtaatgataaaaatcagcacttaaaactttatctttttaaacacttagttaaatttgtccacgttatcattccgagtatattttgttacataaaaatactccacatgcaatcataaacatgtggagttgactattaaatattaaattatagtttaagatttttaagtttatcaccaatcatatcgccaattgttggattatcttcttcttcgttttctaagtacgccttagtcgtagaaggatcactttcaacaacatcttcgtttggtaatgttgctttaatagatagtgatactctttcattctcttcatcaatacctaatattttaacatttacttgttgaccaggttctaacacttcacctggcgtaccaatgtgtttgtgtgcaatttcagaaatatgtacaagtccttgtacacctggtgcaatttcaacaaatgcaccaaagtttgccaatcttactacgacaccttcaatgacatcattttcgtggaattgacctttaatattttcgaaaggtgttggtaacgtatctttgattgataatgaaatacgttctgtatctctatcaatagatttaattttaactttaacatcttgaccaattgaaactacttcttctggtgtttgaacatgttcgtgagaaagttcagatacatgcactaaaccatcaacaccgccaatgtctataaatgcaccaaattgagttaaacgcgctactttaccatcaataacatcgccttcatttaaagattgtaataattgatcttttttagcatcgttttcttcttgttcaactgctttacggcttaaaatgactctattattttcaggatccaattcttcaactttaatacgaattgtttgtccatcaaacacagagaaatcctcaatgaagtctgttgaaattagtgaagccggaacaaaacctctttgtcctacatcaacaaccaaaccacctttaactacttctgttactttcgcttcgatgatttcattattatctaatttttcttgtaaataactataagacttctcagtttcaagttgtcttctagataagatgtaagctccagtttcattttcttcatcaaactcaactttagtgacatatgcttcaacttcgtcgccctcttttacaacttcacttgggctatcaatatgatgcgtagatagttgactaataggaataatcccattaaatttaccaccgttgatatgaacaacaacttgcttgtcttcaacttgttgtacctcgccagtgactttgtcaccttctttaatatcgttaatcattgattcattgaattcttcagtcatcttgtttgcctccttatacactacatatttataacatcttataaactgacagaattgtcaagaaattctacctcgattacattttgcgaaatagtcatatacataaatatgtcactttatcatattcaagtcgtcatatcgataaatatttattacaaccatttttgtatcaaagtaatacagtttgctatgtttatacatattttttgtataaaaattagcatagcttactattttgttttataagtctgtcatttcattgttctctacaagatatattatagtaaaattttatacttttataaaacaaaaagccacgcaaataagcaacttttacatttgaatagtaagaagaccgtatatagtgcatctttctcgaattattacataggacattttttgtgactaaatcagcttcttttgcaatatttagatttgtaacactcattttcttaccatttgtaaaatgctttatgaatgtaatgaattatttttggaattctaataattcacctttattatttctttttactttttgaaaaacttacacaattcactgacgcattaacttttaccaaaaataaaaaggcaactttcattcatcattgaataaaaatcaccttttaatttgagtaaatcattatcagcacattcattttgtatatgcgttaagcgttgcacattacaaatagatagttatgacttattagattatttaatttgactcaccatcgctaaaatttcgtcagtaacttcttcaatcgacttgcctgtcgtatctaatgtcactgcatcatctgcttttcttaatggtgatatttcacggttcatgtcatattgatcacgagcttcaatatcacgttttaaatcttcaaaatttgattcgatacctcttaattgattatctttatatcttctttctgctcgctcttcaactgatgcaatcatatatacttttaaatctgcatctggtagcactacagttccgatatcgcgaccatccattacgatacctttttctgcagctaactctttttgttttttaacggcgaatgaacgtactggctctttagatgcaacgtatgaaacatgttgcgtcacatcattatttcttaaaaagtctgttacatcttcgttatctaaaatgacacattgacctttatctgctttataagttaaatctaatgttgtttggtcaactagttttgcaaagtcctcagttttgtttaattttaaatatttgtatgttaatgcacgatacattgctcctgtatcgacataaatcattgatagttcgctggctacacgtttcgcaattgtactttttccggcagcagctggaccatctaatgcaatattaatggctttcatgcgtcatttcccttccttgtcgttttatgaataatattttatcataattaggtaaattaaatataggaggaaatatatgaaacatctacttgttattcatactggtggcaccattagtatgtcacaagaccaatctaataaagtagtaacaaatgatatcaaccctatttcaatgcatcaagatgtcataaatcaatatgcacaaatagatgaattaaatccttttaatgtaccatcacctcatatgacaatccaacatgttaaacaattaaaggatattattttagaagcagtaacaaataaatattatgatggtttcgttatcacgcatggtaccgatacgttagaagaaactgcctttttacttgatttaatattaggtatcgagcaacctgttgttattactggcgcaatgcgctcgtctaatgaaattggttctgacggattatataattatatttccgctattcgcgttgcctctgatgaaaaggcccgtcataaaggcgtgatggttgtatttaatgatgaaattcatacggcgcgtaatgttaccaaaacacatacgtctaatacaaacacatttcaaagtccaaatcatggtccgctaggtgtattgacaaaggatcgtgtgcaattccatcatatgccatatcgccaacaagcattggaaaatgtcaatgacaaactaaatgtaccattagtaaaagcatatatgggtatgccaggtgacatttttagtttttatagtcgagaaggtatcgatggtatggttattgaagcgttaggacaaggcaacatacctccaagcgcattagaaggcattcaacaattagtatctttaaatatacctattgtgctagtttcacgttcctttaatggtattgtgagtccaacttacgcatacgatggtggtggttaccaactcgcacaacaaggttttattttttctaacggcttgaatggtccaaaagcaagattaaaattattagtcgcgttaagcaacaatttagataaagctgaaatcaaatcatattttgaattataatgaatacgtaacataaaaaggtctatgtacaatcaatagtcatcaacctcatttgacatatcatgaatgtcagtcgttgtaaaactaagttatttagtacatagacctttatttttatgattctaagggcgtttgtttcttagctagcatgctttgagcaataatgcccccgtggaatttaccattttcaataaaaatggtattcgcatcgttccctgcagcaattacacctgcaatatagcaattttcgatatttgtttcgtatgtttctttattatacataggcgctgttccaaattcatttgtattaatttgaatgcctacagattttaaaaattcataatcgggatgataaccaatcatcgcaaatacataatcattgtgtatcgttttactttcaccatttacttcataagtcacagtatcttcagttatttgggtaacattagcattaaattccatgtcaattttttcatgatttactaatgctgtgaaatttggaagtatccacggtttaattgaaggcgaataatctccaccacgatatagaaccgtcacgttagcaccagctttttccaactccaaagcagcatcgatagccgaattcttaccaccgataattacaacatcttgatcaaaatacggatgtgcctctttaaaataatggaacactttaggtaaatccgcaccttcaacttctaatgtattatgctgaccataatagcctgtcgcgattgttaaaaatcgacattcataaacatctttcgtcgtagtaatagtaaatttattattcatttttttaacagttaatacttcttcaaatgcatttacttttaattgatgatgttttacaacttctcggtaataaactagcgcttgattacgtcttggtttactttcttcaacgataaacggtacgtccccaatacttaatttatcacttgatgagaaaaatgtttggtgagtaggataattgtagattgattcaacgacattacccttttcaataattaaggtatcaataccttttcttttttgttcaatagccgcacttaatccgcatggccctccaccaattatgatactttcaactttttgcattgtttcggcctcctttaatcccaaactattataacagttcagtgattgatgcgctaagtctgtgcttgaagatttatgatatatttttgacaatttgtttaatgtgaatagagaattgttagctacggagttgaataacactacaatttaatatgttgatttattttttattcttcctcgttaaatttgttgattgtggtgttttatctttttgatgactatttaaaaagttaaattgatatgccaatattcgagacaagaccttgttaaataacaaactttgaaaaatgaaaaaaccgctacatacttataagcgcaatttaagttctccaaaatatttagagatacttataatatgcacgtttgtatatagcagttcagttacaatttatatagttatattatggaataacgatttgttgaccgtttctaatattgttaccacttaaaccattggcacgtctaattttttcaacattttccggtgaacctgaaccgtagtattgaattgcgatacggtataagttttcttgaccattcactgtatgtctttggccaccaccttgacgttgttgttgctgttgttgattttgattagcttgttgttgattttgattattttgtgcttgattgttcgcttgattagcgttgttttgatcattatcagattcatctttagtcgctttgtcttgatcctcttttgatttatcactgtctgtagattttgatttatctttagaagcgtctttagatgtgtctttgtctttactttcatcagcattatttttatttgtattcgcgattttattttcttttgtaccattattatgattgtttaatgccatgcctccaaatatcgctaatgcaccgataattagtacagctgcaattaatggtaacaatactttggccatgccaccttttttacgttctttatctctgtcatgattgtcatgttcatcatggttttggcttgcattattagaggcatgtggttttgaagcggcagaagcacttttacttgctgcgcctccagccaaacctgctgttccagcaccgatcgctgcaccttttttgccattatgatgatctttagacttatcttgagacgctttatcctcagtcgagttattcgccttgccagaattacttttgttttgagcgtcatttgaatgtttcttagctttagaagcagccattgcaccagctgcacctgcaacacctgctgttccagcaccaatagctgctgcttttttaccattatgatgttctttaggttcatcttgatcttgttttacagaatcattatcatgttcattttttgatgtttctgattggttagcacctgttgtaaaatatggtttaggttgctgagattgttcagcttcactcttatcagaaactgttgaatgctcagtgttattttctgcatttttaatagtatcgtgtttatcattgtcttcgattggttctggatgtgatttatccattgcaaaagcattcttattataatattcctcttcatgttgaggtgtactgtcttgatggctaggttcttgactttcagtactgtgtgatgattcgacttgacgatcatctattgtgccagcctcattttgaacattgtcttcagatgtttgtgattcattgtgaacttgtttattatgattcgttgctaaatcacggcgtctttttcttctttgggcatttcttggcggaaactgttgctccgtattctctattgtatcctgatgttctaattctgattggtctttttcaacatcttccgtatggtcttgatgtgaatttgtgtctatcgattgacgatttttttcaaagtcatctttaaaattattagacatagccatcttcctttctattctattacaatgattttacataaaatatacccacatgacatatgtttatgtatatttttcaaaattatttcaatcatttttcaattgtgtatacactaattatagcttgtcaattttcttttagtaaagtaatactatctgagaaataaattttgcaacttttcatcaaatccaatacttctaattaccttcttcttatttaaaattgcgatatcagttatattagaatcattgtcacaacatcgatcttgtgccggtggatattcaccgaaaaattctaataaatacttccgtctacattgatccaatttgcaatagccaatcatgcgaaagaatcctaattgctttcgtttaaatgattgcttaaatatctgtttcaaggcgccgatactatagaatgattgcaacgttgtcaaaacggcttgtttatcgggagctaaaaattctcctatttcgaaattttgtacatcttcttctgttatcatatctgcaaataataacgtttctaaaatatatttatcgtccggttggaataaactaattgcctgacttagttcaccatcgcgacccgcacggccaatttcttgaatgtagttagaaggacttgttgaaagatgaaagtgaatgattgtgcgaatatcttttttattaattcccataccaaaagcactcgttgcgactataatcggaatatcattatttaaaaattgttgttgaactgtgtgtcgctcttgataattcatatcaccatgataaatacctgtaagaaaacctgaatcataaataagttgcgctaaattcagacacatctttttcgatgagacataaataatcgttggtcccgactgttgtagaaacggcagcaaccattcaattttatcttcatcatcatgaaaattaagatgcttaaagcttatatttgggcgattcattgtagttttaataacattgaattgaatcgctaacatttccgtcaaatcatcttgtaaatgcggtggtgcagttgctgtcaatgctaagacaaccgcttctttaaaatgctttgttacttttcctattagagcataatgtggtctgaaatcatatccccattcagataggcaatgtgcttcatctagaacaatcatgccaaagtctatcatagatattaatttaaaatttgacggttgcaggagaaattctggacttagaaagatgaagcggctatgtcgtaaacatttaatattatgctttttctcaatttcatccataccagagtgaatacatgttacacgtttttctccatttattttcaactgcataacttggtcatccattaaagatattaacggtgagataattaatgtcggcttacctgataaatacgtaggtatttgataacacaaactctttccacttccagttggaagtatacctagagtgtgttgttgagacattatactttctataatttcctgttgtcccggtttaaaactctcgaatccaaatttgtttcgtaaaatatcatgcaacattcagatcacctctttcaaatccaacgattaatacttttaattgaaaatatgataacgtgtcaaattgttctttgtaaaattttaatcgttcgccacgatgctgttgataaaaattcaaaaactggagttgatcttctagttcaacataatcatcgtaattagacatgtaacctttgattaagatttcaagtacatgatcttcgatagtattgattttaacttgttgttgagccgctatatcttccatcgtgaattgttcaagcaattttgtataagtaatataagtttgatttaataatgtaggtttcattattatttttgataaaatagtatattctccactttctaattcaaacatcattgtcactaaattattcatttcgtattcaaacaattgctgttgagatagcttttctattaaactaacttgctgtctcgtatacattggttcatcatagccttgcaaataataatgtaagtaacatggcccttttaaagttattgctttaaacaagttatgtagttcattttcaaaatcaatttgtaattggttttctttaatgtagttatagacaatctttacagtttcttgtatcttattattttgagagattggtacaaaatgaaaaacatgttgtttggtattagacatggtttgcactaatagttgaattgcttgaaatgtttgccccatgctttcaaatgtatatctaggatgcaacatgatttccatttcagcattaaattcattgattttttctaaaaatagctcaaaagacggatattttaatagtggtaaactgtgatataatgacaactgttgttgactacaagcgtcaaaaaaggtttggtgagatttcttaccaactaagatattgtaaatacttttatttgttttatagttaaatgtttgttgtaatgctgtttttataatgtgttgcaaatttaaccctcactctgtaaaacggataatttgaaaataaaaatgatgctgtctaaaattttagtcacattactattttagcatttttatcaaaggaggcgaagacattggcaaaatatacaatcgttgatatggatacttgtattgcatgtggtgcatgcggtgcagcagcgccagatatatatgattacgacgacgaaggtattgctttcgtaatccttgacgataaccaaggtactgcagaagtacctgaggaattatatgaagatatggaagatgcaattgatggatgccctacagattctattaaaattgcagacgaatcatttgatggggacgctttaaaatttgaataattgattttttagacaaatgttctatagaaaaagcaggcaagctatcgtttattgatagtcacctgctttttattattatgtgtatattattttgctttaatttgattaaattcttttcaagaaattcgcaagccttctatatagtaaaataaatacaatagaaataacgatacctttaataatattgaatggtataattcctgaaacaatgattactttaagattatttgcgatatcagctaagttaaatatcataccgtacaaaggtaatagaacgaaatagttcaaaatactcaacacgatagtcataacgattgttgcaatgattaatccagtaatcaaagattttgttgaacgtttatttttatagatggcgtaagcagttaataagaaacttgcgcctgctaaaaagttagcaaatggtccaactggatcgcccatactaaataagtagttcaataaatttttaaccagtgcaactacgataccggcaactggtccaaacgtaaatgtagctagtagtgacggtacatcactaaaatctaaagttaagtatggtggcaaaaatggtataggaaacttgataaaagttaacacaaacgcaatcgcgctcaacatacttattgtgataagacgtttattttgttgcatattcaattttctccttccattcatctcgtaagaataggaggattattgcacaacaaaaaacctccatcttctcccatccagactatactgtcggctctagaatctcactagatcagccactaatatgatacatactagcaggtcgcaggctttatttactgccggttgggaattacacccgaccccgaagatgaattttacattattaaatttaattctcattaattttatactatatatcacaaaacctcaataactatgcttaaattaaatcatagttacgtaattggagagtgatacattggtgatttgcgagcattgtttggaatgttgtttgcttgattaatttttgagatggcttttttgattctatcactcaattgagtaaaaatcgtcataaaatggaaagcaaattataagaatctagtaggttaaaaagttttatatcagtacttccatttatattattatttaaatcaccagaaattacacttaaaatcttctacttatttgccttcacaacaatagtagaattatctttttattcttgatctactcaatatacactattctccgttaaattttcatcattaattttattcttgatcaaacacaccatattctgaagtgctttcaccgttaaaatttggtttaaccgtatttattttattgtccgaaaattttatactaagctctataccgtttggtatctctttatctttttttatttcttctgccatttttattacattttcactgttactttttttagtatagttcttttttttactaaatagagtagtagttaccgaaactttagacttatcttttaattgcttcttaacatttgacaattcttttgaaaattcactgtcacttttgtttaacaatggttcaaaatagtctctatactcagctaaattataaggtatggccgaaatataaaaatattcattttcataaccactattttgcgtcttattaattgcttcttttgtaaatcctgtatattgatatttctcttcattatctttgaaaaatttatataatttatcatatttttctttttgtgctcgatattcaaacccactgagtactgcaccaactaaagtactcatatcatcacctttatccttacttcttaatgagctatcactgtcaataattgatttatcaaatggaatactcgcattaaatacgatgtcgtggtcatcacaatgcacgaatacttctacaccatcgccactacctataacatttgtagctttaacttttagaccgaagttatccataaaaaattgttcgcctcgcttagcaattttatctttatgcttctttgcaaattcaatcgcatctttttctgcaggtggttggaatccttgtcctacatattttgaagcatccatttcttctggtacagattttgtttctttgttggattcgttattggtagttgaacatcctgatagtagtatcgttgccattaagataaattttgcttttttaagcatatctcatcacctatttatgcgcttttaaaagtttcattttgtaaataattatactctcttaatttatttgtgtcttttagtttctctctatataaatcttcaaatacatctgcctgcttaaatcgtttttcgttaactgtaaagtcattatctttattgatgtcttgataaaccctatagctactcaattctgttaaatctctatcatttattttattcatcttcaaatgctccaaacgacactactttcttatcatcaaaacgagctttttttgtgccaataagtttatttcctaattgagtagttatagtattcttgattggcatatcttttgttctttcaattttctcggataaatctattacattatttatcttttcttttctattcctttcatcattcgtactaaacaacgttgctacagtatttgtattagcagtatagtttagctcttttctagctcgttgcataccttctttaaactctttatcatttttatgtatcaatggttcgtaatattttctatattcttttaaatttcttgataaatatgtaatataaaaatattcattttgatacccgacgttttgcgtcttgttaattgcttctttagtaaaacctgtatattgatattgcttttcattttcttttaaaaatttatataaattatcatacttttctttttgcgctcgatattcaaagccactcagcactgtacccaccatcatactcatatcatcaccgttgtcattactacgcattgatcctttttgatggatggcatctttgtacaaaggtagacttgcattaaatacaatgccatgatcttcgcaatgcacataaacttctacaccatcatctttacctacaacatttgtagctttaacttttagtccaaagttatctttaaagaattgttcacctactttttcaaattctttacgatgcttcttcacaaattcaatcgcatctttttctgcaggtggttgaaagccttgtcctacatattttgaagcttccatttcttctggtactgattttgtttctgtatttgtttctgtatttgtttctgtatttgtgtctttttttgattcattattcatcgctgaacatcctgataacagtagcgttgctattaagattaatttcgcctttttaaacatagctcatcacccatttatgtgtttatatagaatattaaaaagcattttaaaaaaaatttattcatctttacgatacactccatattctattggatcattatcatcataaaaggcttttttagtattaatagtaggctttcctatttgaattgtaattgtagatttttctggcttatttttaaaattatatagtttatcactcagttcaattacatcatcaactgtattgtctttagtaaaattttcctttgtactaaacaatgttgttactgtatctgtattagcagcgtaattcacttcttttctggcttgttccattccttctttaaattctttatcatttttatgaatcaatggttcgtaatacttacgatattcttttaagcttcttgacgagtaagtgatataaaaatattcatttttatatccgacattttgcgtcttgtttattgcttcttttgtaaagcctgtatattggtatttctcttcattatctttgaaaaatttatataaattgtcatacttttctttttgtgttcgatattcaaagccactcaacactgtaccaactaaagtactcatatcatcgcctttgtcctcacttcttaatgagctatcactctcaattattgatttatcaaatggaatactcgcattaaatacgatatcgtggtcatcacaatgcacgaatacttctacgccttttccactacctacaacattggtagctttaacttttagaccgaaattatccataaaaaattgttcgcctcgtttggcaattttatctttatgctttttcgcaaattcaaccacatctttttctgcaggtggttggaagccttgacctacatattttgaagcttccatttcttctggcactgattttgtttctttattagattcgttattggtagttgaacatcctgatagcagtaatgttgctattaagattagtttagttcttttaaacatagctcatcacccatttatgtgtttgtaaaacttttatgtttgaaaaagctacttattctcaatgaaaacaagtagcatttaataaattaattagtatacagctagtttttctaattgttctttaacttgaattaagtttgaccgtattagagaggcagattgatccatcgtttgaattgcttgtccttcattttcgttcaagccattacaaacaacttcaaactgttgtgccatttgatcaagacgcgcatgagcttgtgtgtttaaaataaacatatcgtcataatgtgatggttcaaatatcatttgtacaatcaaaggcttcatgttcttaacaatatcatctaaatggttatctaaaattggtgacactgcttttaaatcattaagaaaaggctcccatttgcctaaagtattatctaattcttctaatttagttttaatataattacaagttacattaggaatcagggacaaaaattctttcttttttacatttaacatttcaattgcatgtcttaaattcttacgtattttgggaattgtattaatcaaatattttattacatcgacaattttcgatgcatattcatcatatataccttgaacatagtctgctatttttttaataccatcatcgatatggtcttttaatattttcatttttcttcctaaataattagaaggtataactagaccctgtaccatattttcgccgctacaattaatttgaaaatttccatctaaaattgttgcatcttgttgtttcataatacttctaatatctgcaatttgcctaccataaatatcattttgattttttatttggtctatattctgtttcactactttcaaatgtttcatcatttcttcagatactccatctctgaagtcgtgatctatatttttgaaaatttctaaaatttcattatctatactatcatacactttttctataaaagattttatacctttaaacaactcattaattctttcttttaatgcatccaatgcaaaatcaggtaataagtgtttaacagcactaatactttctattgtttcatctgcaacttcttcaagtgagtttattttactaattaaagttctttccatttcttctaactgaaataagttaatcttatccttaaatccttctgataattgtttctttctatctgcaaaatttttattttcattttctgagatgttaaaactttcatttaaaaagattacgcattctgctaacataccacttgtttcaccagtaatcagtttactcaacgcatcaagattttctaaattaagtttaattaaagttcctcttccagaacgtgcaatcgaatctcctgtccaaacatttattggaattcgcccatccatatctaatgttatgttaatagtcttttttactttttttccatttttaatttctgtatcttttaccgactttattttgattagtggtacagtatcgtatgtgttatcttttctatttaacttccttttataacctacatggctgtctattaaagtatctaacctgggcacaccatcattaatgttaacgcgttttcctggcatatctttgatgaatggatcttgtaaccatgttaataaatcgttggtactattaaaactaatcatattatcaaagcgtggtctagcaaatttctgccaagcagcataaggaatcattgctgagtcagtagcaacaactttttcattcggatgtttcgctccttgatattttgctcctgcaccgccttccgaattaccgccatccgccacaatggttttgtttttgaagttacttgattccattctatatttttttaaaaaatcactatttgataatctatctgcatcttctaactttattttatattgatttgataattgatctgtttgctttaaataatctgtgctttcattatcattattcattaatttagcattttggagccaatcatctccaaaccccgatgattttaatggattatttggattaattgcctcattagatgttccttgataaattattgtctgttgaccagttggtttacttttatcatctaataactcatatattttaatatcagcagcaccattcaaattactattcttatcatcattataactgtctacttgtttaaacctttttccattaactttaaattctttttttatatcaatattttgataaacccagtaactacttaattctgttaaatccctatcattaattttattcatctttactgtgcaccccatattctattggacgattatcatcataaaaggctttcttagtattaatagtgggtttccctatttgtattgtgattgtagatttatctggtttattttttaaattatataatttatcacttagttcgattacatcatctactgtattgtctttagtaaagtttttcttagtagaaaaaagtgtagcaacagcatctgtatttgcagcgtaattcacttcttttcttgctcgttccattccttctttaaattctttatcattttttcgaatcagtggttcataatactttcgatattcttttaaacttctagaagagtatgtaatataaaaatattcatttttatatccgacattttgtgtcttgttaattgcctcttttgtaaagcctgtatattgatatttcttttcattttctttgaagaatttatataagttatcatacttttctttttgcgctcgatattcaaagccactcagcactgtacccaccatcatactcatatcatcaccattgtcattactgcgcattgatcctttttgatggatggcatctttgtacaaaggtagacttgcattaaatacaatgccatgatcttcacaatgcacataaacttctacaccatcatctttacctacaacatttgtagctttaacttttagtccaaagttatctttaaagaattgttcacctactttttcaaattctttacgatgcttcttcgcaaattcaatcgcatttttttctgcaggcggttggaagccttggcctacatattttgaagcttccatttcttctggtacagattttgtttctgtttttgtgtctttttttgattcattttccatcgtggaacatccccctaaaattaatgtcgtagctaaaactgatccaatgaattttttcatatgacacctcgaataatttaattaatacaatatatctatattttaccctatttttataatcaaataaataactttatcaaactttatatttttgtataaattagtaatatatttaatagttgatattcgcaaaaaccctaagttctaatccacatacaaaattccccacatcaatcaaaaaacgcatgctataaattagagtctctaatcaataacatgcgttctgaaataactatattcaattttattctggttttggtagtttaataataaatgttgtgcctttccctaattcgcttttaacatctatggaaccaccatgctcttcgataatcattttacaaatgaacaaacctaaaccggtaccttgtttacctcgcgttctcgctgcatcaactttataaaaacgatcaaatacttgttgtaaatgttctggtgcaatgcctgtacctgtatctttaatgtataaaatatcttcgctttcattttcatcacaagtaattgcaatttcatctccaggtttcgtataacgtgatgcattatcaattaagttcgttagtacttggtccatgcgatccatatcataactccaaacacgcttcttacaataattaaaagtcatatttagacctaaatcatcagcttgttggcgatacttaattttcatcttatctagtaacgctgcaataggctgaacttctttatttacggataacccttcagcatccatgcgtgcgacatttaacaattcattaactaaacgatttaaacgtttcgattcatcaaggacaatggcaagcgattcttttatttcatccggttctgtaacaataccatctacaattgattcagtataaccttgaagtaatgatatcggtgtacgtaattcatgtgatacattagcaatgaaatctttcttcatttgatctagattgtgctcattagtcatatcacgaactgtcacaacaacaccacttttacctccctgttcaatcttgtcgatatagcttgtggtcacaacaaagaatcgtgcattcatttctaaatcgcgcatttcagtttgttttgatttaaaagtatcttctatttgtcttaataagaaagctttagcatcttcatcaatattgtccataatatcattcgccatcttattagataagataatttgtcgactctcattaatacctaggacaccttctaccatagagttaattaagctgtctctaatatttttagatgtggataatgcgtcgacatgctcttcgatttctgtactcatctgattaaatgcctgcgataattgaccaatttcatctttcgttgtgacagaaggtttataagagtaatccccttcagatacacgtgtagcttggtctcttaaacgtcttaaaggttttgtaattcttgacgataagaaaaacgcaaagactgttgtaattgttaagaaaataacagccgtaattatggtgataatcgtaatagcattatttgtatcttcgattgatttcaagtctttatatataaagactccactatatttgctatgactattcttctgtgcttttgttggatagcctaacaaaatatatgtttgagatgagcccttttctttaatcgttacatttcgagtaacagatttacctttatcaaacacatcgtcaaaatggtcgttgttgactacttcattcaacatttgctttttaatattagaaagtgaagccgttgattgacgatgtttattatttataatcatcaacccaccaggattttcaattaatgtttgactatattttattgcttcttctttattatgtgattgttcgaccagtgaacttatacgtctagcatcttctcttatggcattttcggtttcttgtgtgaaatagtattgcataaaggtaattaaagcaatacttaataaaattaaaactgtcgtcactattaaaataatagttaaccacagtttaattacgacactatttagccggctcatcattagatttaacctcaaatttatacccaacgccccagactgtttgaatcatatgcgcagcttcactagacacacgatttaacttttctctaagtcgtttaacatgagtatcaactgttcttaaatcaccatagaattcataatgccaaacttcttttaataattgttcacggtcaaatactttatttggtgttttagctaaatatattaataattcgtactctttaggagtcaaattaacttcttgattatcagcaagtacgcgatgtgcatcattatctatttctaaatgtttaaattcaatcacatcacgtgcgtgaggttcgctttgttctacagttgtagattgcgttcttcttagaagtgctttaactcttaagactacttctcttggtgaaaatggtttgacgatataatcatctgcaccagattcaaaaccttcaacacggtttgtttcttcacctttagcagtcaacataataatcggtgtttgtttatgttcacgcaatttagttgccacctggataccatccatttcaggcaacattaaatctagtagtatgcaagcataattattctccattgcaagttcataagcctcttggccattacttgcttcatggatttcaaaagattctctttctaaatacattttaagtaatcttctgattctatcctcatcatctacgataagtatttcgttcgacatacaggtcatacctcccacacatgcttttctttacaaaagtattatatcacaggaaagcgcatacagttattaaaaacctaaaattttgtgaaaaaattctcaaactttgtgataaatacatattttatttaattatttcccatgttctgctaaatgacgcatcacttttacttcatgaggcgtcaatacacgtccttcaccagcattcaaaccgacaacatttaaaggcccatattcaatacgagacagtttcgtcacttgatgaccaaaatgttcgaacattcttctgacttggcgattacgaccttctgtaattgtaatttcaaccaatgttgtgtttttatctttatcttgtttcttaactttcacttcagccggttgcgtcataccatcttctaattcaatacctttttctagcgctttcacttcttctctcattaaataaccttttaatttcgcaacatattttttcttaatttgatatcttggatgtgtcattaaattagtaaattcaccatcatttgtgagtaataacaatccagaagtatcatagtctaaacgaccaacaggataaatacgtgcttctatatctttaaagtaatctgtaaccactgtacgtcctctatcatcagatacacttgttatcacttgagttggtttatggaataaaatgtaaattttgtcttctagttctattttaataccttcaacttcaatcgtatctgatggcttcacttttgttcctaattcagtgacagtcgtaccattcactttcacttttccttcagaaattaaagtttctgccttacgtcttgaagtataaccgctattagctatacgtttttgtaatcgttctaattctttagtcattattttctcctttttgattgactagattactgaaaaaagcatccatttcttcatcgtcttcttcagttgtcggcaaatcttctatattggaaataccaaatacatttaaaaataaatcagtagtaattaactgttggctacgctgttcattaaccactttagcctcaactagtcctttggcaatcaatgtcttaactgcaccatctgaattgatactacgaattaattcaatatcacttcttgataatggctggttataagcaataattgatagtacttccattgctgcttgtgataatttcatttgtgacttttgttcaattaattgttcaatatacgttgccgcttcttttttagtcgttaaaacatacgtcattccaaatcgttgtatcattaatccatgtgatgaataattttcaattaattcaacgagttggtctttcgacatatctaatatttctaatagttgtttttcatctaaaccttcatcgccagctgtaaataaaagcgactctaatataccatgattatccaaaatggtagttcactcctctaataatgttaatatcttcaaaattacgttgttgctcaatattaattattcctgcttttgacatctctaaaatagctaaaaagtgagtgactacttgttcaattggctcagaaaacgtaaacagactaaagaagttaaaatgatctttatctttcaatctcgatgtcacttgttctgtagcttgttgaatggtaaatgtctcttttcggatttcaacagatttaggtgtatttaactcaactctatttttaactctttgataagctacaattaattcagttaaatcaatcgtatgatttggatcccaagattcatctgtttccaaatgagataaatctgtcggtctttttgtaaaataaaaatctctttcttctttcatgtcatttaaaatagcagtatattctttataattttgatattctattaaacgcccaactaaatcttcccgtgggtcatcatcaacatccatatctgatgttgattgtggtaatagcatcttacttttaatcattaagagttctgacgctaatactaggtattcacttgcaatattaatttcaagctgtttcattgcatgaacgtactgcatatactgctctgttaatgcttgcataggaatatcataaatatctatttcaaatttttggataagatgcagcaataaatctaatggtccattgaaagcatctaatttaacttcatacataatatctacctcgtattgcgtcatatgtgcataattctctaaaatattatagcatgaaaataacttacttttaaattggggtgataacaaaatgcaacaggcactgataaatttctattatcaatttcatactaagcaacattatttcctatgtcatgacattttagaagatgcatggaaagctgaaaataactacagtaagcaagatgcagttgttagtttaatcttgtttgcaactgcttgttaccattatcgccgcaataatttaaaaggcgcctataagtcttttaataaatctaaagaaataatacaaaatgctaaagatagagatgcgttataccttaatttaaatgattatcagttgttaattgagcaacagattgcaaaattgaatgcagcaaagcctttttcatctgttatattaccaataactccagtctttgaacgcatcatcaaggccaactatccagactatgattataatcaggaaacagcaacagatccttttattgtagaccatcacatgcgccgtgatcgttcagaagtgattgcagcaaaagaagaagcgattcaattaagaaaacatagacgtaattaatcaaccaatttaaaaaagccacaatagcacagacatttttagtcatgtgtattgtgacttttgagttattgttcactttatgctctaggatgaaattggttatacatttttctaatttgagatttcgaaacatgtgtatagagttgggtagtagatatgtcagagtgacctaacatctcttgcactgctcttaaatctgcgccattttccaataaatgtgtcgcaaaagagtggcgtaacgtatgtggcgttaacgtctttttaatgtttgcctttacaccattttgtttaatcattttccatattgcttgtcgtgataaaggtttaccatgcatatttaaaaataagacttcagtaacagtcttttttaaaagttgcggtctaatcgtttcaatataagtagttaagtactcaatgactgcgtcgcctaatggtacaattctttctttatcgcctttaccaaatacgcgtacaaatcccattattaagttcacgttttctaactctaaatgtatcaattcagatacacgcattcccgttgcgtacagaagttctaacatcgtacgatcacgatatccattaattttatttaaatctggcgtttctaataaagccaacacttcgtcaacatttaaaacgtcaggcaattttttgtcatattttggtgaatctaataataccgttggatctttcgccgcatatttttctcttatagcaaattgatgaaaactacggattgttgaaataaatcgcgcaatagatttagcagattgcccttggtctattaaatgccccaaacactcttgaattaattgtcgatctataaaatcaatatgcgagatatgatgttcagtcatataatcttgatactttttcaaatcacgtctataagcaccaattgtgttagaacttagtcctttttcaatttgtataaaacgcaaatattcttcaataattgtttccataaccacacctctaaaaaaagcgaaggttaatttaacctacgcaatttactatcctttacctttagcttggcacgtttcacacacaccatggaaagttaaacgatgatctaaaattttaaaattgaactcattttcaactcgattttcaacttctggtaacaaatcttcatcgatttcatctacacgaccacattccatacatactaaatgatggtggaaatgttttgcgccttcttttcttaaatcaaaacgagcgacgccatcaccaaagttaattttgtcgacaacttttagttcagctaacaactctaacgttctgtatactgtcgccaagccaatttcaggcgctttatcttttactttcagatatacgtcttcagcacttagatgatctttttcattttcaattagaactctaacagtagcttcgcgttgtggcgttagcttatatgatgattgttgtaattgttgcttaacgcgatttaatcgttcttccaacgatgtccactcccctactaataattaaaatcattacaaattatttcaaactttacaattaaaactaacagttttctcaataaaatgcaagcttttctcatttgttatttagaatgattataatttaataataggtgttgcaatgcaatgatagtcttcgcatcttctatttctttattcattagcatcgatttaacattctcaatcggaactttaatgacttcgacaaattcatcttcatctaagtgaactgtaccttcttctaaattatccgtaaaatatattgataattgttcatcgcaaaaacctggtgaaccatacatatctacaacatgtgttaactctttggcaatatatcctgtttcttcttctaattcacgttttgccgcttcgactctatcttcatcatcttctaatttaccagctggaatttctagcaatggtttttctactggtttacgatactgtttcactaatacgacttcttttttaggtgtcactgcacaaacagcaactgcaccattatgataaactaattctcttgttgacgtttcaccgtttggtaatgtcactgtatgaatttctacatctacaattttgccattataaataactgttcgatcaattgttttttcatttaaatccattataatcacgttcctttaaattcatattatatattgatacactatgcttgttagctaaagtgtatcgaaaggagaacagacatgcaaaaaaatatattaaaaagtggtatttcattatctgaattaggtctaggttgcatgagtttaggtacagatttaaaaaaagccgaacaaattatagattgtgctgttgaaaatggtatcacttattttgatacagcagatatgtacgataaaggtataaatgaatcagttgttggtaaggcacttcttaaatatcaacaacgcgatgatatttttattggtacaaaagtaggcaatcgtttaacaaaagatggcagtacaacatgggatccgagtaaatcctatattaaagaggcagttaaaggttcactaaagcgtttaggtatcgatcatatcgatttatatcaacttcatggcggaaccattgatgacccattagacgaaacaataagcgcatttgatgaattgaaacaagaaggaattatacgtgcttacggtatttcttctattcgcccaaatgtaattgattattatttaaaacatagtcaaatcgaaacgataatgtctcaattcaatttgattgataatcgtccagaatcattattagatgcaattcacaacaatgatgttaaagtattggcaagaggacctgtgtctaaaggattattaacttcaaacagtgttaatgtgctcgacaataaatttaaagatggtatttttgattattctcatgatgaattgggtgaaacaatagcctctattaaagaaattgaaagtaatttatctgcattgacatttagttatttaacatcacatgacgtgcttggttccatcattgtaggtgcaagtagcgtcgaccaattaaaagaaaatattgaaaactatcatactaaagttagtttagatcagattaaaacagcaagagctcgtgtaaaggatttggaatataccaatcatttagtgtagaagtcattttcagtaataaaaacagcagcatgaggcgtttcattataaaaatgccttactgctgttgtttatgtacaattcgctataatttatgattatgattactcacttatgatagaaattaaagcgttgtcctcacgcatcagtatttagtaatttcgccttgcggcattgccttaagcaaacttctgccacttcatctcttaataattttattaaaacatctttctatatttcacttcgcatgttgattcatcattattagttattatttgtacacccagcacatttccttgcaacacaagtagtttgaatttttcacaagtataatataatgtaccgtctgaaatttggtctacagaaatatcgcctaaaatatccagcactgtaaattcttcaaatactgatagttgttccgcatatcgtacacaaagtcttaccacactctccgattgacagttcattgccatcccacctatttatgctttatttttaaataatttagggaaacatcgttcaaaaaatctaggcgcaatttgatacattttcaacgcatgatgcatccatttaggccgattaatttccaattgttttgttttaatgccataaatgatatcttctgcaagctgattagcatcaagcataatttcccccatctttttagcatacttcattgatgggtcggctttttgatgaaaaggtgtatcaatcgggccaacattaactgtcatgatatgtaagtttggtgactctagtcttaaagcattcattaatgcataaaaccctgctttcgatgccccataatgtgcagcatttgcttgtgtggaaaatgcagcttgacttgaaatacctacaatatgtgcgttagatgttaaatatggtctcaacacagtatataaaacattaaaactaattaaattaagctgatacgtttcaatcatttctgaaaaactatggtctgaaatagatttgaaataacctaaacctgcactataaatgaatccatcgaatgatgtattgtcttcaaattgcagtgcctgtatcgacttcaaatcatttaagtcacaaggaataacatttatagttttccccaattcctgttcaaagattctagttgctttatcaacatcacgcaccaacaacgttacatgcactttattttctagtaactttcggacaatcgataaacctaaaccactcgtaccaccagtcactataaaatgttgtcctttcatcaattaaccttccttttcaattatatagaatgcaatttatcaactttacataattgagacaagttgattatctttcctaatatatatacaataataagaaaatataacatacaaatcaaaaactaaagggatgtgacgttaatgaaactcgtattttatggagctggtaatatggcacaagctatatttacaggaattattaactcaagcaacttagatgccaatgatatatatttaacaaataaatctaatgaacaagctttaaaagcattcgctgaaaaactaggtgttaactatagttatgatgatgcgacattattaaaagatgcagattatgtatttttaggtaccaaaccacatgactttgatgctctagcaacacgcatcaaaccacatattacaaaagacaattgcttcatttcaattatggcaggtattccgattgattatattaaacaacaattagaatgccaaaatccagttgctagaattatgccaaacacaaatgcgcaagttggacactctgttactggcattagtttttcaaacaactttgaccctaaatctaaagatgaaattaacgatttagttaaagcatttggttctgtaattgaagtatcagaagatcatttacatcaagtaacagctatcaccggaagcggcccagcatttttatatcatgtattcgagcaatatgttaaagctggtacgaaacttggtctagaaaaagaacaagttgaagaatctatacgcaaccttattataggtacaagtaagatgattgaacgttcagatttgagcatggctcaattaagaaaaaatattacctctaaaggtggtacgacacaagctggccttgatacattgtcacaatatgatttagtatctattttcgaagattgtctaaacgctgccgtcgaccgtagtattgaactttctaatatagaagaccaataaaaacaaacccgccaacacatgtatgcatcatcgcaagcactgtgtttgacgggttatttttataatttattgttatttggcaagcattgtttattactttgtcattagattttaaaactatcaaaatcttttacaaaattaaaattaggtgtatcttcattttgtatcaatgtttgataaatttcatttatatcttctgtattatagcgattgctcaaatgtgtaatcaacgtacgtttaacattggcttcttttatcaatgcaaatacgtcttcaatatggctatgatgataattgttggctaaatgcttttcaccatctatataggtcgcttcatgtaccatcacatcagcatctctagaaatcacacgttcattagaacatggttttgtatcaccaaaaattgctacaactggaccctgtttggactcacctctaaaatcttttgattgataaacttgaccattatgttcaaatgtatcatgagattttacttcttgatatttaggacctggttcaagaccaatgttttttaacgcttcaacattgattgtacctgtagtttcaggtgccattactctatatccatatgatggaataccatgattaagtaaatgcgcctctacagtaaaaccatcatgatgatatgtcagatgatcatcgatttcaatatatgtaattggatagtttaaatgtgactctgataaattcatagacatttccacatatgctttaattccttttggtccaaccaatgtaagcggcttctgttcaccgccctgaaaagaacgactagaaagtaatcctggcaaaccaaaaatatgatcgccatgcatatgagtaataaatatatgtgtcacttttcctaatttaattgcatgatgtaaaatttggtgctgtgtaccttcaccaacgtcgaaaagccatatggaattggaatatggttctaaatttaaggcgattgcttgtgtatttctctcttttgtaggcaaacctgcactcgttccaaaaaatgtaacttccatatatgcccctccttttcttcaattcattttatcataaaatttgtatcaatttagttttaatttatacttgaatcaaaatctgttaaaaattcgtctttgctagttaatttttctaactttaacgtagacataactatataaattttgataattacgttatacttatcattaataagtatcacattaaacatgatacatgaatcgatatttcatttaagacactgcatacagtcgagcatattgtatgacctactgaatggattatcttataataataaatcatatatctaattaagaattgaggttttaatcttgagtactaaaaacaaacacatcccatgtttaatcacaatctttggtgcaactggtgacttaagccatcgtaagttgtttccatcaatattccatctctaccaacaagacaatttagatgaacatattgccatcatcggtattggacgtcgtgacattactaatgatgatttccgtaatcaagtaaaatcatcaattcaaaagcacgtaaaagatacaaacaaaattgacgcgtttatggaacatgtcttctatcatagacatgatgttagtaatgaagaaagctatcaagaattactagattttagtaatgaattagatagccaatttgaattaaaaggtaatcgactattctatttagcaatggcaccacaattctttggcgttatttctgattatctaaaatcttctggtcttactgatacaaaaggatttaaacgccttgttatcgaaaaaccattcggtagtgatttaaaatcagccgaagcattaaacaatcaaattcgtaaatcatttaaagaagaagaaatttatcgtattgaccactatttaggaaaagacatggttcaaaatatcgaggtattacgttttgcgaatgcgatgtttgaaccattatggaataacaaatatatttcaaacatccaagttacatcttctgaaatactaggtgttgaagatcgtggtggttattatgaatcaagtggcgcgctaaaagatatggtgcaaaaccacatgttacaaatggttgcattattagctatggaagcacctattagtttaaatagtgaagatatccgtgctgagaaagtaaaagtacttaaatcactgcgtcatttccaatctgaagatgttaaaaagaactttgttcgtggtcaatatggcgaaggctatatcgatggtaaacaagttaaagcataccgtgatgaagatcgcgttgcagatgactctaacacacctacctttgtttcaggtaaattaacaattgataactttagatgggctggtgtaccattctatattcgtactggtaaacgtatgaaatctaaaacaattcaagttgtcgttgaatttaaagaagtaccaatgaacttatactatgaaactgataaactgttagattcaaacctattagtaatcaatatccaacctaatgaaggtgtatctttacatctaaatgctaagaaaaatacacaaggtatcgaaacagaacctgtccaattgtcttactcaatgagcgctcaagataaaatgaatactgtagatgcatatgaaaatctattatttgattgtcttaaaggtgatgccactaacttcacgcactgggaagaattaaaatcaacatggaaatttgttgatgcaattcaagatgaatggaatatggttgatccagaattccctaactatgaatcaggtactaatggtccattagaaagtgatttactacttgctcgtgatggtaaccattggtgggacgatattcaataattgaattaaaacgcacatgttaaacaaaaataaatgagcgaatgacaaggattgattacgaatcaagtaaatcaattgttctatcattcgctttttttctagactatattatgaaattatattttacaatgcccaaaactattttaataatcattgaacaaatgggtgtataatttatagaaataatgtagaataaaaataaatgattgaattaattggagtgaaagttttggacgttatcaagcaaatacaacaggcaattgtttatattgaagatcgtttattagagcctttcaatttgcaagaattaagtgattacgttggtctttcgccataccatcttgatcaatcatttaaaatgattgtcggcttatctccagaagcttatgcacgcgcgcgtaaaatgacactcgctgcaaatgatgtgattaatggtgctacacgacttgtagatatcgctaaaaaatatcactatgcaaattcaaatgattttgcaaatgattttagtgattttcacggcgtatcacctattcaagcctctactaaaaaagatgaattacaaattcaagagcgattatatatcaaattatcaactactgagagagcaccttatccatacagattagaagagacagatgatatttcattggttggatatgcacgatttatagacactaagtatttgtcacatccttttaatgttccggattttttagaagacttgctcattgatggtaaaattaaagagttacgacgatataatgacgttagtccatttgaactatttgttattagttgtcctcttgaaaatggtttagaaatatttgtaggtgtaccaagtgaacgttatcctgcacacttagaaagtcgatttttacctggcaaacattgtgcgaaattcaatttacaaggtgaaattgattatgcaactaatgaagcttggtactatattgaatcaagtttgcagttaacattgccatatgaacgaaatgatttatatgttgaagtgtaccctctcgatatttcatttaatgacccattcactaaaattcagctttggattcctgttaaacagagtccttatgacgaagattaaataataaaaaacaaagaagccccctaatatatctataggtctacaaatggccttagattctattagggggcatattaatatgttaatttagttcgataacacatgcttcatatggacgtaactgttttaaattaactttggcatcataattaaatagctttacttctccatggcttaaatcaaatggtacagttaattctgcttcgtggttagtaagattacctacaataagaacttgcttttcatttaatgttctcgtgtacgcaaaaacttgtgaattttcagcatctactaaatcaaattgaccatatacgtatacatcattagactttcttaattgaattaaatctttataaaattgtaatactgaatgctcatcttctaattgttgtgcaacattgatagttttataattcggattcactgggaaccacggttcaccatttgtaaatcctccatttaacgtatcatcccattgcattggtgtgcgagaattatctcggttctcatctttatatttcgcaagtaaagcgtctacatctccaccttgagctttcactatttgatagtcatttttaacagcaacatcgttaaacgtttcaatactttcaaatggataattcgtcataccaatttcttgaccttgataaatgaatggcgtaccttgttgcaagaaataaacagctgcatgacttgttgctgattcataccaatacttgtcatcgtcaccccacgtcgatacacgtcgtggttggtcgtgattttcaataaacaacgcattccaacctttattttcaagttgtttttgccatctatttaatacagatttatacgaatttacatcaaagtgagaatcaccactattccacagtcccaaatgttcaaattggaatatcatattaaatttaccattttcttccccgacccagtcatcagcatcatcagggcttacaccattcgcttcaccaacagtcataatgtcatacttacttaatgagcgatctttcatctcttgtaaccaagtttgtatacctggctgattcatatctacatcaaatgctggggcatatgttttaccctcaggtacaggtaagtcacccgcttcaaacgtcttcttaatatgcgtaattgcatctactctaaatccatcaatgcctttatcaaaccaccagttcatcatttcaaatacagcatctctaacttccggattaccccaattcaaatcaggttgttttttactgaataaatggaaataatattgctcagtattagcatcatattcccatgtagatccattaaatatactttcccagttgttaggttcagagccatctggctttggatcttgccaaatgtaccaatcacgtttgggattgtctttactagatttggattctataaaccaaggatgttcatcagatgtatgatttacaactaaatctaaaataagcttcatgcctctatcatgaacaccttttaataaacgatcaaagtcttccatcgttccaaattcatccataatctcttggtagtcactaatatcataaccattgtcatcattaggtgatttaaacattggactgagccaaatgacatcgataccgaaatcttttaagtagtccaatttatcaatcattccaggtaaatccccaataccatcgtgattactatcattaaaacttcttggatatacttgatatgctactgcttctttccaccattgcttattcattttaaaactcctttgctatcgctgtgttgattttcttatttttaattctgtatctataatgacgagttcaataacatcctgtgctttgtttttcaatatatttaaaattgctgcaccagcctgttgacctaacattcgaggcttgatgtcaatacaggtttgtggtggtgacgcaatttcggttaaataagaatcattgaacgttgctgtcattacatctttcggaatttcaatattaagttcatataggacacttaaaatcgctaaatgtaacatagcatctaacgaaatgattgcctgtttaatatttgggtccttcaaacgcgtatgtagattttgcatgtaattaaaaataacttctctttcattactagtctcaataatttgataattaattttattttgagaagctatcgtttcaaatccttgaattctatcttttgaaacttcaaaatttcctttttctgtaataaatattaattcatctacaccttgttcaataacatgtcgtgtcaaattttcagaagctaatatattatcattatctatatgtgtaaattgatgatctatatccgatgtaggcttaccaatcacaataaatggcatgctttcatcaattaacatttgtttaatcggatcattttcttttgaatagagcagtataaacgcatcaaccattcgttgtttaatcattttataaacttcatccattaaatcattcatattatttgagactgtcgtttgtgtaccatagccatgctggttacacgtttcagaaattcctagcaatacattgatgtagaatggattcagtcgaataggctcctcagacccttttaacactaaaccaattttatatgtttggtttgtaattaaagttctagcagcggtattaggaaaataattcaattcttccataactttcttcacttttgaaattgtcgcttcgctaatacgttgatttccttttataactcttgaaactgtcgaaggagaaacaccggcttttagtgcaacatctttaatcgtaaccatttaatcacctcctgttaatttctgcatcggaaaacgcttccaaccactgtataataccagtttagtcacactttctaaaaaagtcaaaagatttgtgcaaacgattgcataaaacgataaaaataaaaccttcatactgaaattcaatccgaaaatcaatataaaggtttgtataaatattaaaatcgattgtttagtcactaactgcaaaatagttaccttggccatcttgaaaattaaatacacgttgaccattcatttctactatatcatgcccagttaaacctaaatcatttaattttgagtataatgcatcaaagtttttctctttaaacattaaagatggtgttcctaggttcacttccgggctatgcttttcaataaattcttttgccataatcgtcaatgacgtttcagcatctttggtaggtgatacttcaactgcaacatagtcctcagctaacggtgtttcacttacaacaacaaattctaaagtttctgtccaaaatgctttcgctttttcgacatcatcaacatataacataacttgatttaacttttccataaaatagtacctctatttctctatagtacatgctatcataacacagtaaatattttattacttcacaaaatgcttaaaaatatggcgggatgcttttaaggtcaaggataatacttgtgtaattttttataggttgtagctactctatcacactctcttttatatttatcaaaagatataaaaaaggatagtatctttcaactatcctttaatcaatattattcttcaatccattgtgtatggaatacgccttctttatcttttctttcgtacgtatgagcaccgaagtagtcacgttgtgcttgaattaagtttgcaggtaaatcagcagcacggtaactatcatagtaattaatacttgatgagaaaccaggtgttggtacaccattttgaacaccagttgcgacaacatcacgtaacgcatcttgatattcagtaacgatgtttttaaagtaaggatctagcaataagttttgtaatcctggattattatcgtaagcatctttgatcttttgtaagaattgtgcacggataatgcaaccttctctccaaatcatagctaaatcaccaagttttaaattccattcattatcttcacttgctttacgcatttgcgcgaaaccttgtgcataagaacaaattttactcatatataatgctttacgaattttttctaaaaagtctttcttgtcaccatcaaatgatgcttttggaccatttaattctttagaagcatttacgcgctcttctttgattgaagagataaaacgtgcaaatacagattcagtaatgattgttaatggaatacctaattctaatgcgttaattgaagtccattttcctgtacctttttgacctgcagtatcaagaattttttcaactaatgcttctttattttcatctaatttcatgaaaatatcaccagtgatttcaattaaataactttctaattcaccagcattccagtctttgaacgtttgagcaatgtcttcatgagacatgcctaataattctttcatcatagcataactttctgcaattaattgcatgtcagcatattcgataccattgtgtaccattttcacatagtgtccagcaccattaggtccaatataagtaacacatgaagcaccgtcttttgcctttgcagcaattgcatcaagaatatctgcaactttgttataagcttcttcttgtccacccggcattaatgacggaccagttaacgctccaatttcaccaccagaaacgcccataccaataaagttgattgcactttgtgctaatgctttattacgtctgatagtatcttgatagtttgtattaccaccatcaattaaaatatctccatcatctaataaaggtaacaaactatcaatcgttgcgtccgtagctttacctgcttgaaccattaataaaattttacgtggtttttctaaagaattaacaaattcttccaatgaatacgttggatgaatatttttcccttttgattcttcaaccattaaatcagttttttcacttgagcggttaaatacagatacactatatccgcgtgattcaatattccaagctaggtttttacccataacggctaaaccaataactccaatttgttgtgtcatattacttacctcacttgttgatttttcattagtattgtatcacaaaatagacatacactacactaaatcatttcgaatgtcgcgcaactattttgattatttctaacacttgacttgcaagcaagttcaatgatttaatcggcattctctcatttgttgtatggattttttcataacccactcctaaaatgactgaaggaataccaaatgtattaataatactgccgtctgaaccgccaccagaaataattgtatttgcagataatcctaaattacgagcactttcttgtgcaattttaacaaccgcttcattatcattaattttaaatcctggataactttgctccactgtaactactgctttcccacctaattctgatgcagtagtttcaaacacatcagtcatatgtttgacttgtgtttttattctttctggatcgtgagaacgtgcctctgcttctaaaatgacttcatctgcaacaatattcgtagctgaaccgccatgaaacttaccaatattggcagtagttatttcatcaacttgtcctaatttcattcgactaattgctttcgccgcaatattaatagcactaacaccctcttttggcgtacttgcatgagccgttttgccaaaaattttagctgaaattaacatttgcgtcggtgcacctacaaccgtagtaccgacatcagcacttgcatcaatagcataaccaaagtccgcgtccaacaactctgaatttaattctttagcaccaattaaacctgattcttctccaacagtaatcacaaattgaatttgtccatgtgggatttgttgttcctttatcacttgcaaaacttcaagcatcgctgataatcctgctttatcatctgcacctagaatagtcgtaccatcagagtatatgtagccgtcatcttttacaattggctttacattaattgcgggtacaacagtatccatatggctcgtcaaatataatttaggtacttcgccttcttcgatagtactattcattgtacacactagattattggcacctaatttaggatgtttagccgcttcatcttctttaacatctaaccctaatgctatgaatttttcttttaaaataggttggattgttgattcattccctgtctcagaatcgatttgtacaagttcaaaaaacgtattaagtaatctttgctcattaatcataatggaaccccttttatcaaaattttcatgtacgccaaacggtaaaaattgatgaaataaaatgttacagtaattgacgttacacagatttatcaggtttgtaaattgtgtcatattattttcaatttattatatataattattgtaactcaaactaagctttgtcaaaaatatattgattgatttttcaaagatatcgtataatgaggaaaatgacataagcaaacttactcatgttttttattatattcctttatgatgattgctagttatatcgtctcaagttaaaagttttatatcttatgtcgtaattattaatacaaaggttattcatttggaggcacacaaaatgcaaaataaagttttaagaattatcattatcgttatgcttgtatcagttgtattagcattgttattaacgagtatcattccaattttataaactatatctcaactacctatacaaaatcatacaattaaaaatccatccattataaacgcatgtattaataagttatcgtattgcaacgattactttcaaacatgggtcatacggatggattattttttaagctacttcactatgcattttcaatgaaccaaattgcgatttgatttgtaaatattcttctaattcatttaatatttgaataatacttgctctcgagttaagcgctttgtgtgttgttggcaatggcagttcatccaatttcaaacgcgtctcatacaaattgtgtaaacgcattgctgtatagtcattactattcacatttagaccaatttctttcagcagtgacgcaacatcatttaaaagcggatctttatgacagatactttcgatgagcggtttcattctcattaacaattccacttgctcttctcgcatatcaaaataatgatagtatgaattttcgtttctaacaaaatgatttttaacatctcggaacgcgatagacttcgcctttttaatatttaaaagtaacacttcaaattcaatcgcaatggtatcttcatatttttcacaaatataactatatttactaaaaatatcagcaatttgttgctcaattttacatttgtattcgtctagttgtttgtctaaacttggcatcattaaattcattgtaaatgcaatgcttagtccaattaacagtaataatgtttcattaacaattaaatgtgcatcaattgattttgcattaaaaacatgaagtaatataacgcaactcgtaatgacaccttcttgtacttttaatacgacagttaatggtataaataacaatacgataataccgagtacaattggactctgacctaataaactaaatattgctgaacctaaaaacaatactaaaaaacatgatactaatcttgaaataatcgcttgtagcgaatgtacttttgtatgtttaatacataatacgactaatatggcgcttgaagcataattatctaaacctaacagcttactaataattacacctaaagtcatacccactgctgtttttattgttctaaatccaatcttgtaaggatttaactttaacatgggttagcgcctcttatctttcttcacaatatttattgaataatgtttgtaattgattaattacgttcatcacatcatgaccttcgatttgatgtctttcaatcatttctgtaatctttccatcttttactaatgcaaatgacggacttgaaggcgcataaccttcgaagtattcacgcgctctttgtgtcgcttctttatcttgtccagcaaatactgtcactagacgatcaggtaatacgtcataatgtaaagcatgtgatgctgctggtcttgcgataccacctgcacaaccacatacagaattgatcataactagtgttgtaccatcttgtttaagaactttgtcaacatcttctgcagtagttaattgctcatatcccgcagattcaatttcattccttgcttgttctacaacaccgttcatgtataaatcgaaattcatgtccataagttcaatcacctatccctttatatttaaactatcctcattctactaattaataacatattgttcaataaactaatctgaatcacacctatatttagacacaattttaacaatataccaaacattattgtgcttaaaatcatggtaactaatttgttcacatgttttcattaatatgtttcaagtatgatgtcttattttgactttactgcaaaaatgcattcaaccatgttgattattgttctttatcttttttgaatatattgcacatattttagtgccaaaaaataatacatccatcgacaagaacaagataaaacaagttgtcgatagatgcatctatgttatcactaatatatatttgtattttctaaagtatactgttcgatacgctgtttaatatgattcataaatttacctgtttgtaaaccatctaaaatacgatgatcaattgaaatacataaattaaccatgttacgaattgcaatcatatcattaattactactggctttttaacgattgattctacttgtaaaatcgctgcttgtggatgatttataatacccattgatgatactgaaccaaatgtaccagtattatttaccgtaaatgtaccgccctgcatatcttcagctgtcaattgcttattacgcgctttcgttgctaaagtattaatttctctagctatacctttgattgacttttcgtctgcatgcttaatcacaggtacgtataatttattttcatcagcaacagcaattgaaatattaatgtctttatgtaagacaatttcatttccttgccagctactatttaataaaggatatgcttttaaagcatctgctacagcttttacaaagaaagcaaagaacgttagattatatccttctttatttttaaagctgtttttataatgatttctcgtattcacaagatttgtagcatctacttcaatcatcatccatgcatgtggaatctctgttacactattaaccatattttgcgcaattgctttacgcacaccatttactggtattgtgctgttttcactattgtcttcagatgattggttacttgatgtatctactgatgttgattttgtttgaacttgtttgtcagattgagctgtggtaccaccattttcaataactgacattatatccttcttagttacacgaccttcaaatccactacctacaacttgtgataaatcaatgtcatgctctgaagcgagtttaaatacaacaggtgaaaagcgaccattattacgtggttgattttgtttagcagtagatgtctgttccactgttgcactagcttttttagtagatttctgagtatgctcatccacttttgcttgtatctcttcagttgtttcatttgtcttttcatcagcagtttcaattttacagataattgtatcaatagctactgtctgccccgcttcaactaaaatttctgtaattgttcctgatatcgtggaagggacttcagctgtcactttatctgtaataacttcacataatggttcatattcatcaatatgatcaccaacagaaactaaccattgttcaatggtgccttcatgaacactctcacctaacttaggcattgttatttccatgactttccctccctagaattctgctaattcacgcattttatttaagattttttctggattcatcataatttcattttctaatacaggagaaaatggcatagatggtacatctggagcagctaaacgcatgattggtgcatctaaatcgaacaagcaatgctctgcaataatcgctgacacttctgacataatactaccttctaaattatcttcagttacaagtaaaactttacctgtatgtttagcacgatcaataattgtttctttatctaatggataaacagttcgtaaatcaacgacttcaacattgataccgtctgcagctaaaatatccgctgcttgtaaacaataattgaccattaatccataacaaaatactgttaaatcttcaccttcacgtttcacatctgcttttcctaaaggtacagtgtaatattcttctggcacttcttcctttaagaaacgataagcttttttatgctcaaagtacaatactggatcatttgattcgatagatgataataaaagccctttagcatcatacggtgtggaaggaataacaattgttaaacctggcgatgaagcaaatatactttcaatactttgtgaatgatatagtcctccgtgaacaccgccaccaaatggtgcacgaatcgttaatgggcattgccaatcattatttgaacgataacgcattttcgcagcttcactaataatttgatttgtcgcaggtaaaataaaatctgcaaattgaatttctgcaattggtcttttacctaccatagctgcaccaatggcagttccaacaatatttgactcagctaatggcgtatcgataactctgtcttcaccatatttttgttgcagtccttgagtagtaccaaatacgccaccttttctaccaacatcttcaccaagaataaacacatctttattttgttgtaatgctaagtcttgtgcctggcgtatcgcctctaaataagataatttagccattagttaagactcccttcttcgtacacaaatgcataggcttcttcgacacttggatatggcgcgtcttcagcagcctttgtcgctttattgatgatgtctttatgctccgcttctatttctgccaaccaagcatcatcgataatgccagctgaaagcaactcttttttgaacttttcattgcagtctgcttttttaagcgtttcacgctcttctttcgtacgatattggtcgtcatcatctgatgaatgagctgtcatacgacttgttactgcttcaatcaaagttgaaccttgaccagaaatagctcgatctcttgcttctttcatcgctttatacattgctaatggatcattaccatctacttgttcaccatgtataccgtaaccaagtgctctatccgataatttttcagctgcgtattgtaatgaatcaggtactgaaattgcatatttattatttataatgacacatacaaaaggaagtttgtgtacacccgcgaagtttaaaccttcatggaagtcaccttggtttgagctaccttcaccaacagttgctgttgcaattttcttcttaccatccatttttaaagctaaagcagcaccaacagcatggggtatttgagttgctaccggtgaactttgagacaaaatattcttagctctactactaaagtgtgatggcatttgttttccaccagagttaacatcgtctttctttccaaacgctgataaaaacgtatcatacgctgagatacccatataagtaacgaaagctagatctctataataaggcgctgtaatatcaccttcttctaatgcgtatgccatcccaatctgagttgcttcttgtccttgaccacttacaacaaatggaattttacctgcacggttcaataaccacagtctttcatctatttttctacctaaatccatccatttatatattacttttaggtcttcttcgctaaggcctaatgatttataatcaatcatgttaaatcctcctatttatacgtgaatagctctactttctgctttcaatcctaattccatcaacacttcagagatggaaggatgtgcgtgtgttgttagtcctaattctaatgccgagccattcatgaactgtaacagtgatgcctcattaatcaattctgttacatgtggaccaatcatattaatacccacaatttcttcagttgattgatcaatcaccatttcgctatacccttcgtttgtgtcatggctatcaatcactgctttaccaattgctttaaatggtactttaaaacttttaactttcattccctctgcctttgcttgttcaatgtttaaaccgatagaagcaatttcaggttgtgaataaatacacttaggcatcatgttatagtttactgggattgggttcccctcaaacatatgatcaacagccacaacaccttcttttgatccaacatgtgccaattgtaattttcctatacaatcaccagctgcataaatatgtttatcttcagtttgttgaaattcgttcgttaaaatatgtcctgatgttgaaagttttattttagtgttgtttaaaccaatatctgatgtgttaggttttctaccaatcgatagcaacactttatctactttaattatgtctgaggaaatttcaaacgtaacaccatcttcgttaacatttatatcattttcagaaagttttattccctcatagaatttaacaccacgtgctgacaatgatttttttaatagttgtgaagcttgtttactttcagttggtaaaattctttcacctgcttctataactgttacgtcaacacctaaatctatcatcaatgatgcaaattccattccgataacaccaccaccaataataccaatacttgatggtaacgtctttaatgataatatatcatcgctagataaaattttatcatgatcaaatgataagaatggcaactctgcaggcgaagaaccagttgcaattaatacaaattggttgggtaataagtctgattcaccatcttcatattcgacagaaattgtgccactttgaggtgaaaatatagatgtacctagaatacgtcccgtgccattataaatgtcaatgtgattgtgttgcattaaatgctttacaccttgatacatttgattaataatgtcttcttttcgtgccaacatattttcaaaattaacattagcatctttgacatcaacgccaaacattgctgcctgttttactgtttgaaatacttcagcagatttaagcagcgatttagtaggaatacaacctttatggagacaagtacctcctaatagttgtcgttctactattgccacttttttacctaattgagacgcacgtatcgcagcaacatatcctgcagtacctccaccgagaacgactaaatcatattgtttctctgacatgttcttactcctaactaatgatatatatccattgaaaatttattaatacatagttttcatgtccattaattacctattttacatgattgtctatttagtttgaatgcacataaataaatccataaatgagtattcaacacactttggaaattatctacgtctttgattgtgttgtatcatttctcttgcattttctcgagttaaatcagtaacacttgcacctgaaatcattcgtgcaatttcatctactttatcatcgctaattaactcttgaacttgtgttgttgtacgatcatcttttgatgatttcgaaattaataaatgatggtcgctcatcgatgcaacttgtggtaagtgagagatacaaataacttgtatatattctgctatatctcgcattttctctgccattttttgtgcagcttgtccagatacacctgagtcaacctcatcgaataaaattgcagtttgacctctcgatttaacaaaaatactttttaacgctaacataattctagaaagttctccacctgacgcaattttatttaaactttttaatggttcccctttatttggactgattaaaaattctacaaattcgattccatcaatattcggttcttctaattttttaaatgaaatctcaagatttgcgtctttcatttgtaagttttgaatttccgatacaatgtggtctcttaactccctagcgactatacgacgctgctttgataacgcttgtccaacctctataacttgattatacaatgcatttatttcttctcgtaactgcgatgtactttgttcatagttttcaattttattgatttcattattaagcttttcttgatatgcgattaattctgaaatatcttttccatatttacgttttaaattattcagcaaattcatacgagattcatactcgtttaacacttgttcgtcgaattctgtattagccatttcatcatataactcatgttttgcatcttctaaaatgtagtaaaattgatcaatatcttcttttaatttgtcatatttgtttggaactatatcgtttattgttaacaaatggttgcttagttcatataaacgatcagtgatagcattttcatccgttaatgtcatatatgcgttattaagcgctaagcttaatttttcagagttttgaatgcgtttaatatctatttcaagttgctctatttcgccttcttttagatgtgcttcagacaattcttctaattggaatttcattaaatctaaacgctgtagcaatgcttggtctgctgattctaaatcttctaactcttgctttttggctttataattttgaaaagtttggtgatatttatccaacaaatcttgataacgtgattctgcgtaattatccaataatgttaaatggtatttttgtttcaacaaagactgcgtttcatgttggccatgaatatctaataattcttgcataacttttcgtaaatcttgtaaagtaactgtttgattattaattttacaaagacttttaccagagctgaaaatttcccgtttaactaataaaaaatcttcatctacatcaatatccatatttttcaatatatgtatagcatctttactctcgtcaatatcaaatataccttcgatgacagcctttttttcaccatgtcttacaaaatcagatgaagctctcattccaattaattgtccaattgcatctataataattgacttacctgaacccgtttcaccacttaaaacagttaaaccatcagaaaattgaatttctaattcttcaataatagcaaattgcttgattgataaggtttgtaacataaactcatcgcatccttataacaaattgaaaattcttgacttgatttcatcacttgcctctttgcttcgacaaataattaaacaagtatcatcaccacaaattgtgcctagtacttcttcccaattgatttggtctaatatagctccaatagattgtgcattaccaggtaatgtttttagaacaagtaaattatcagtaccatctatattaacaaaggaatccattaaataacgtcccaatttttctaaaggatggaattttctatcatttggtaaactataaacatattgacctgaaggtataggtactttaataagttgtagttctttaatatcacgagaaacagttgcttgagtgacatttaaatcataatcgtttaatcgtttaactaattcatcttgtgtctctatctgttcatttgaaataatttctctaatttttatatgcctaaccgattttttgggcacagtaaacacctctgattacgaatatttatacatttattttaacacatgcactgatttacgactactaaacacctttacgtaaaaagggtaaacatggtttatctatcttggttatctatttataaatatttttcatattacgcataacaattgcttaaaatatgtataaaaatgaatatatgtgtaataaacttgctaattattagatttaataagcgtcaattgtttgaacatatttaattaaaatcacattgatatcacagatacgaatattgtcgtatagaaattgaaaattctattttttaaatgaaagtcttcaacataattttaagtttcaacatgagaaaaatcgattaacaaacaacgtcagttgaatatgccttttgagacatttcaaactttacaattgttgctaatcgatatatttgcttttagtgatccctgctataaaataaatcaacgatttctaataagtgttttgtattgaattgttcatcaatttgcgttagttcatccactgctgcgtctctatgataagtcaatttatcttctgcgccatctttccctaataaactcacgtacgtacttttattattttcaagatcgctgcccacttttttacctaactttgcttcatcaccatagcagtctaataaatcatctttaatctggaacatcatacctaaatgataactataactttctaaatgttctttagttgtatcatcgacattagcgatatctgctgcactcataaccgcaaaagttaataatgctcctgtttttgttttgtgtatcatttccaaagtttcaagatcaattggttggccttcgctttgcatatctaacatttgaccgccgaccattccaacatgaccacttgctattgacagccgttgtagaacttttatttttacttcatcagttaatctatcatcacttgaaataagttcaaatgctttagttaataaagcatcacctgctaatatcgcagtccactcaccatatactttatgatttgttaattttcctcgtcgataatcatcattatccatcgctggtaggtcatcatgaataagtgaatatgtatgaatcatttctagtgcaattgcgctcttcatacctaactcatactcggtatttagtgaatctaaagtgagtaataacagaactggtcggatgcgtttacctccagcatttaatgaatacaacatactttcttctagctgagtatccattactgatttatttatcgcaaccgataattcattattgacttcatctattaatttattcatcggtagattcgtcattttttacatcctcagcttcttcttttattaagtcattcacctttttttcggcattttttaaagttgtgtcacaagctgctgatagtttcataccacgttgatataaatctaatgattcctctaaagatactgtttcattatctaatttttgaacaatttgctctaattcttgcatcatttcttcaaaactttgcgtttctttagtcattattacaccttactttcgtaacttttgcatctactaagccatctttcattgttaacgtcaattgatcattttctgttaaatctttagtactcgtaatgacttcgtcttttttattaacaattgcatatccacgcaacattgtattagttggacttaaattgtttaagttttctactttatttttcaaatcatttttataacttaatatcttagaattcaataatttaacaagttggtttgtcaattgaagattattttgttgttcttgattaacactacttagtaatgcttttaaattataacgttgttgcaacagcattaatcgatgtctctgttgttcaaaagttgcctgaatttgttgtttcagtctcttttctaaatcatctcgacgttgtatctgttgatcatacaataaagttggttgtttaaacttgtaatacgatgacaaatgttcaacatgtttacgttgttgttctaaatgtttcttgatgaaacgagtcaatgtaaactgatattgctgtatttgttgcagcaattcatattggtctggtgttgcaataacagcagcttgagttggagtcgcagctctgatgtctgcagcaaaatcacttaatgtaaagtctgtttcatgaccaactgctgatataatcggtgtcttacaattatatattgcacggacgacagcttcttcgttgaaattccataaatcttctatggatccaccgcctcgacctacaataatggtatctacacctaaactatctgcatattcaattttttcaataatgtcgtcttttgctttttcaccttgaaccaaagtactaatttgtatttgttcagctaatggaaaacgactatttatcgttgaatggatatctcgaattgcggcacctgtactcgctgttaaaactgcaatttttttaggaaacttaggtattgatttcttattcgctttatcaaaacaaccttcttcagttaattttttctttaatgcttctaatttttgatataagttccctataccatctaattgcattttatttacataaatttgatagtttccacgacgttcaaaaacagaaacacgtgcttctaataagacttcatctccttctttaggttcgaagtttaatttagaagcactacctttgaacatcatggcacttataacgctttctttatctttcacattaaagtataaatgaccacttgaatgctttttgaaatttgaaagctcacctttaatcaatacagattggagatgtggatcttgatcaaatttatatttaatatatttcgttaaagctgaaacacttaaataatctgacatataacatcactcaattttatttttttatattactcaatacaccatttataaatttataatgatcatcatcactgaattgttttgttaattcaactgcttcattcattacgactttagcaggtgtatcactgtgtaatatttcatatgttgccattcttaaaataatacgatccgtttttaataaacgtgcaatagtccaatcttttaaataaggactaattgtctcgtctaatacaggttcgtgatctttaacgccagaaactagccaatgaataaattcgaagtctaaatctggattatcgtctttaataaagcttatcgcttcatttatcgttaaatcactgtccttcatttctaattgaaataaagtttgaaaagcttgcactcgggattctttacgactcatttttaactccttcaaacgtttgtatttttctttatttaattactgaattaggtatgacattacttttcaataacgatttgtgtaatgtgaatattaatttgcttaggttctatcgctgtcatattagaaattgaattaaaaattgacgtttgaattttgtttgcagtttttgaaatattaacaccatgttttaatgcacaatatacatctatatatatgccatcttctttactctcgatttttaaatcacggcttaaatttttacgactaactttttctaaatttgtttcttttaattcagcaaaatggccagtgatgccttcgacttccgaagtagctatacttgcaataacagatagcacttctggcgctatttctactttacctaattttgaatttgaataatcagttactttgaccatggattgacctcctattaaccttcatcattcataatgctattttgctctaaaaagtttgtattaaatttaccgcttctaaatatatcgttattcaataatttaatatggaatggaatagttgtatcaataccaagaaccacaaattcacttagtgcacgaatgccagccataatcgcttcatctcgtgtcggttcatgtatgattaatttcgctaccatcgaatcataatatggcggtatcgtataattagtataacatgctgactctattcgaacaccatatccacctggtgcaagatattgctcaattttacctggtgatggcataaagttcttgtaaggattttcagcattaattctaaattcaattgcgtgtcctgttaatttaatatcttcttgtttatacggtaacacgtcacccatagcaacttgtaattgtaatttaactaaatcaattcctgttaccatttcagttacaggatgttctacttgaatacgtgtattcatttccataaaataaaatttattatcatttaaatcatatataaactcaattgttcccgcattttcataatttacagctttcgctgcacgaactgcggcatttcccatttcacgacgtgtttcatcatctaaaattggggaaggtgcttcttccactaatttctgcatacgtctttgaattgtacaatcacgttctcctaaatgaattacattaccatagctgtccccaacaatttggatttcaatatggcggaagttttcgatgaatttctccatataaagtccaccattaccaaatgcagtttgagcttcttgttctgtcattcggaagccagtttcaagttctttttcatcacgagcaacacggataccttttccgccaccgccagcagtagctttaatgatgaccggatagccaatttttttggcgattttcttagcttctgagacgtctttcattaaaccgtcactaccaggaacaactggaacattggctttgatcatttctgccttagcaacatctttgatacccattttttggatagattgataacttggtccaatgaacttcaattggcatgcttcgcataattctgcaaaatcagcattttcagctaaaaagccataacccggatgaacgccatcacaacctgtagaagttgcaatagataagatgttcggaatatttaaatatgaatctttagacaaagtgggacctacgcaatatgcttcatcagcaatttgagtatgtagcgcatctttatccccttcagaatagattgcaacagtttggatgcctaaatcacgacaagcgcgaataatcctaactgcgatttcaccgcggtttgcaattaaaacctttttcattatttcaccttaaataacggttggccatactctaccatttgtccgtcttctactaagatttcaacaatttcacctgaaatttctgcttgaatttcattaaatagtttcattgcctctaaaatacacactgttgtttcatttgaaacagtgtccccaacttgcacatatgcttcttcgtctggagatggcgatttgtaaaatgtacctaccataggtgcattaattgttttgtgattatctgaagttggctttggagcttcagttttattgctatcagttgattgtgcttgaggcataggcattgccgcagcttcaactggcatttgtgagatttgtggcgtgataatctcagtttctttttctttcttaagcgtcactttgcctttagtatcttcaatattgatttccgttaaagttgatttatccagaatttcaattaattctttgatttctttaaagttcattattactgactccttcagtttgttttcatctacccgtctattttacttgagacaactcttcaattcaagcatgttcatattgctggcgacattataagtctatcccaaagttataataaaaccacattttaaattaaaaacacttgtgtatttattacttaacattgactcatcttaactcttgattaaaaattttatgcattcagttaaacatatcaatgttatttttattagctattatgttttatcctcaacaatatgatatgtagatatatacctttactcatgtctatgttttttcactaccaattagacgattcgttttatattttaaaaattattttaaaaataaaaagcctcatatcagcatataacctataatcattttaggcaatagctttatgagacttatttagaatatcttacgttaaatcagtatagtgaatacaagctatttgttaacaaattagagattatcctcttgaaatgtagcttccatcaccagtgttgataattaaaacgtcaccttcgtttacaaataaaggtacatttaatgtataaccagtttcaacagttgccgatttagtggcaccagttgcagtatcacctttaataccaggttctgtttcagttactgttaattcaacagttttaggtaattcaacaccgatagtttcaccttcgtatgtttgaatttgtacttccataccttcttttaagtaattcaattcttcttttaagtaatcacttgaaagttctgtttgttcaaagctttcattatccataaatacatgattatctccgtcagcatataaatattgcatgcgacgattttcaatcattgctggttcaactttttcaccagctctaaacgttttctcttgaattgcaccagttcttaaattacgtaattttgaacgaacgaatgctgaacctttaccaggctttacatgttggaagtctataactttccaaatagcgttatcaacagaaattgttaaacctgttttaaaatcattaaccgaaatcattcagtttcctcctcattttacacgcttatgttaaaactataaggtcttttgtgcatttagtaaagacttgacaaccattttctgtaattaaaatatcatcttctattcttataccgcccaaaccttctatataaacaccaggttctactgtaacacagttgttaacttgaagtttatcttgtatcgtacgagccagcattggcccttcatggatttctaaaccaataccatgtcctagtgaatgtccaaattcttttccatacccttttgactctaaatagtttcttgaaatggcatcagcttctgcaccagtcatgccaggtctaatctcattaattgctttcatttgagattcaagtactatttgatatatttctttcagtttaggatctggttctccaatagcaaatgttctagtaatatctgaacaatagccgttataatacgcgccaaaatctaatgtaatcatgtcgcctttttcaataattttatcacttgcaacaccatgtggtaatgcacctctatgaccagatgctacaatcgtatcgaatgatggtccatctgctcctaattctagcattttgctttctaatattgcctttaattctttttcagtcatgcctgcttttacaacagttaaaatatattcatatgtttcatcaacaatattagctgctttttgaattaaagcaatttcgtcagcatctttgacgtctctaattttatctacagtattagaaatgcttattaatgatatacggcttttatttaattcaaggtatgtatcataacttacatgatgcccctcaaaacctacattttcaaaattttcttggtgtagcaattctttaatctcaccaataatagtagatttacgattaataatttcataatttggcgcctgcttagttgcttgatcaatatatctaaagtctgttatcaaatattgtttatctttagatatgataagtgctccactggtaccagtaaaacctgataaatatcttctattgtaatccgaaagaatgataatcgcatctaaatgtttttgttctaaaatacgatgcacttgtgttattctgctcatcttattacctcctagtgaaacgtttgtgcatttcaactttatacattaaaataatatcataataaggataaaaaataatagatattgattttagggagatagtaatgaaaaaattggtttcaattgttggcgcaacattattgttagctggatgtggatcacaaaatttagcaccattagaagaaaaaacaacagatttaagagaagataatcatcaactcaaactagatattcaagaacttaatcaacaaattagtgattctaaatctaaaattaaagggcttgaaaaggataaagaaaacagtaaaaaaactgcatctaataatacgaaaattaaattgatgaatgttacatcaacatactacgacaaagttgctaaagctttgaaatcctataacgatattgagaaagatgtaagtaaaaacaaaggcgataagaatgttcaatcgaaattaaatcaaatttctaatgatattcaaagtgctcacacttcatacaaagatgctatcgatggtttatcacttagtgatgatgataaaaaaacgtctaaaaatatcgataaattaaactctgatttgaatcatgcatttgatgatattaaaaatggctatcaaaataaagataaaaaacaacttacaaaaggacaacaagcgttgtcaaaattaaacttaaatgcaaaatcatgataggagtcttttaatgcgtaatataatattttatcttgtacttattattgctgcgattggattagtaatgaatctagatgcctttattttttcaatcgtcagaatgttaatcagctttgctgtaatagctggtattatttatctgatttattatttcttcatcttaactgaagaccaacgcaaatatcgcaaagcaatgcgtaagtataaaagaaatcaaagaagaaaatagataaaaaaacggaagcacttgtaggtaaaatagtctacgtgcttccattttttattctaaaaactactttctaaacatccattcatctgaacgatatttttcagttaattcttccacttctgccaattgagcttctgttaattcaagtggctttaattctatatttaaacctttcttaaaacctttctcgaaagcttcttccatttgactaatagtaatgtgttcatctgaaatatcattgatggcaactgctttttcaacgaatgcctctttcatttttaattttaatctttcatttttataaataaacatatcaaacagttcatcaatatcaatatcttgtaaaatcgaaccgtgttggaggattacgcccttttgtctcgtttgagcactcccagcaatcttacggccttcaacaactagctcataccaacttggtgcatcaaaacacactgaacttcgaggttgttttaatttttgacgctcttcaggcgttttaggtaccgcaaaataagtatcaaatcctaagtttttaaatccttctaataatccttgtgaaatcactctgtacgcttctgtaactgtagaaggcatattcggatgcgattcaggcacaatcacactgtaagttaactctttatcatgtagcaccccacggccaccagtttgacgccttacgagaccaaaacctttctctttaaccttatcaatatcaatttctttttgtagcctttggaaataccctattgataatgttgcaggattccatgtgtaaaaacgtataactggatcaatttcacctctagagacaaaatttaataacgcttcatccattgccatattataatatgggtctttacttcctgtattaataaaattccaagtttcagtcatattcaagaactcctatcagcaaaatgtataatatttgattcgctaattaatcaatttaactaaatgaataataattgcaattctttagtgaaatattttgataatttgacctaacagtcttataattatattatcgtttaattagggaggatgcaagatgagtgctagtttgtacatcgcaataattttagttatagcaattattgcttatatgattgttcaacaaattcttaacaagcgagctgttaaagaattagatcaaaatgaattccataatgggattagaaaagctcaagtcatcgatgttagagagaaagttgactatgactacggtcacattaatgggtctcgcaatattcctatgacaatgttcaggcaacgattccaaggattaagaaaagatcaaccggtatacttatgtgatgccaatgggattgctagctatagagccgctcgtattttgaaaaagaatggatatacagatatctatatgttaaaaggcggctataaaaaatggactggaaaaataaagtctaaaaaatagtttttgtaaatttaatatacgatttaataaaatctgagtgttaattgatcatcaataacaatactcagattttaattttttaacaaagtctgttactatatttctctagcttcactgatcattaaacttagtttcagcataataaagaaagttcagctcattttcaatacgattcaattaccgcaatctaaaaaatgaaaagacaatttctatgaaagaataataccaaaccctaagagttattacttcggtttagttttcttgtttaaatagaaattgtctttttcaattgattttgaaaccattatccttaaatcttcatacaaagttagaataataattctcggaatatgtgtttaatactttatttttcctgtttaagattttcaaactttaatattggtttacgagcagctgtagcttcgtctaatcgatcaatcacagttgtatgtggtgcttctagcactttatcaggatcatttttagcttcttcagcaatactaattaatgtatcgataaaataatcaagtgtttctttagactctgtctcagtcggttcaatcatcataccttcttcaacatttaatgggaagtatattgttggtggatgtacaccgaaatctaataatcgcttagccatgtctaaagtacgtacaccaaattctttttgacgcacaccacttaacacaaactcgtgtttacaatattgtttataaggtatttcaaagtgtttagataaacgtgctttaatataattcgcattaagaaccgctgcttcagaaacctctttaagtccagttgctcccatagttcgaatatacgtataagctcttaagtaaataccaaagttaccataaaatggttttacacgtccgatagaatttttaatgtcattatcatatttaaatttgtcgccatctttaataaccattggctttggtaagtaacttgctagttcttttactacaccgactggacctgaaccaggaccgccaccaccatgtggaccagtaaatgttttatgcaagtttaaatgaacagcatcaaatcccatatctcctgggcgaactttgtccataatagcgtttaaattcgcaccatcataatataatagaccaccagcattatggacgatttcacggatttccataatatttttttcgaaaatacctaaagtgtttggattagttaacataatagctgctgtattttcatttacaacacgtttcaagtcatcaatatcaacttcgccacgttcgtttgattttacagtaactgatttaaatcctgcaaatgaagctgaggctggattcgtaccatgcgcagaatctggcacaatgacttcatcacgatgaccttcaccattattctcatggtaagctttaaatatcatcaatgcagtccattcaccatgtgcgccagcagctggttgtaatgtcacctcatccataccagtaatttcttttaattcttcttgcaaactataaataatttctaatgaaccttgaacttgatcttcatcttgtaatggatgtgattcactaaatcctggtattctagcaaccttttcattaattttagggttatacttcatcgtacatgaacccaatggataaaatccgttgtctacaccgaaatttttatttgaaagttcagtataatgacgtactaagtctagttcagcaacttcaggaaactccgctttgtttttacgaataaatttatcatctaacaatgactcaacagaatttgttttaatatcactttttggtaatgaatatgcatatctgccttcacgagatctttcaaaaattaatggacttgatttactagtcatttaactcaccagccttttctacaaatgtatcgatttcatcttttgttcttaattcagttacagctattaacatgtgatttttaaagtcgtctgaaacaacacctaaatcaaaaccaccgataatattgtacttcactaattcctcgttaacttgttgaattggtttgtcaaatttgactacaaactcattgaaagatgtaccatctaatacttcaaaaccttttttaataaattgttgtttagcatagttagcatgttctatattttgaactgcaatatcatagataccttgtttaccaagtgctgacattgcaattgatgacgctaaagcatttaatgcttggttagaacaaatattagatgtcgctttatcgcgtcgaatatgttgttcacatgcttgtaatgttaatacaaagccacgattaccttcatcatcttgtgtttgaccgactaatctacctggcactttacgcattaactttttcgtcgttgcaaaatatccacaatgtggcccaccgaattgagcaggaattccgaatggctgagtatcacctacaacaatatctgcaccaaatgaacctggaggtgtaagtaatcccaatgctaatggatttgcatatacgataaataatgcttttttatcttcaataaagctatgaatcttttcaagatcttcaattgaaccgtaaaagtttggatattgtactgcaacagctgctgtttcatcatccactgctgcttctaattttttcaaatctgtaacagtgccatctaaatcgatttccactacttcgaattccttacgcgtcttagcataagtatgaagtacttgtaatgcttgataatgtaaaccttttgagactacaattttatttttctttgtttgactaaatgctaagatacatgcttcagcaaagctagtcatcccatcatacatagaagaatttgctacatccatatctgttaattcacaaattaaagtttggaactcaaaaatggcttgtaattcaccttgagaaatttccggttgatatggcgtatatgctgtgtaaaattctgatcttgaaatcatagcatccacaactgatggcgcgtaatgatcataaacaccagcacccaaaaatgatgtatgcgtttctttagtgatattcttgcttgcaatgcgatttaatcttctaagtaacgttgtttccgcttcgccttcagcaatatttaaatctctatttaataaaatgtcacttggtacatcaccgaataattctcctatagattttgcaccaattgtttgtaacatttcttgcttgtctttttcagttaaaggtatataacgatgactcacaatgcacacccctttttaattatttatcaatttgatttttcttaacaattttcgcttttaattgacgcttacgaacttgaacaagcaactctctacccatttcaaactcatctctttttatcattgcaagtgcaattgattttcctgatgatggagactgtgttcctgaagttacttctccaataatatttccatctaaatccataacttcataaccagttcttgcaattcctttttcaagtaattctaatcccactgttcttcttggtgcaccattttctttttgatcttttaatacagatttaccaataaaatcagcatcaattaatggtttacttgcaaaagcgataccaccttcatatggtgtaattgattcagttaaatcttgtccatgtaatggcaatccagcctctaatcttaatgtatcacgagcgcctaacccacatggcataacattatactctaataaaccatcccaaattttttcagtatcatcgatattacaataaatttcaaacccatcttcacctgtgtaacctgactgagataaaatgacgtttgctccaaataatttgacaccctgtttaaattcaaacattttcatttcagttacatcttcatcaactaattgattaattaaatctctagcttttggtccttgtattgctaattgaccatattggtttgatacattttgtacttcaacatcaaatttctctttgtgttttaaaatccaattaaaatctttttcagtattagcagcattaacaactaataaataattgtcgtcagctaatttatatattactaaatcatcaataataccgccttcttcattacataaagcagtatataatgcttttgaagtagttaaattatcagtatcatttgataataaatattgcacaaactgactagcatctttacctgttacttcaatttcacccatatgactaacatcaaacaggccaatttcgtatcgaacagcattatgctcctctttaatacttgaaaattgaacaggcatcgcccatcctccgaattccacaatttttgcacctctatcaacataattttgatataaaggtgtttgttttaaatcacttgacattgaaatacccccttaaaattataaaaacaggatagcaatcgctaccctgtttataaatcaccaattcaggaacgcgttacagtattatccttttgcctgagagtttcgtaataaattacttgcaccttcggcgatagagtcttaacgctctattctctctaatactgatcactcgcttttattaaatttagcaattcataatatatttctgaaattgatagcaaatgactatcaaatttcttgaatgcgatttcattatatcttaaattccgcgagcaatacaagtcatttaactgcttgattgtcttattatttgcattaggtcgatgtgggtcatcattgattcgactatatataatatcaatattacaatctaaccaaataatgtttttttgatttttcaaaaaattaaatgcctcttcactctcaataataccaccaccagtagcaattatatctgcagtgttaatacattcttgcaaacatgtgaactctaaattcctgaaatattgttcaccatgtttacaaaatatttctggtattgttaacttatacttctcttcgatatatgaatctatatcaataaatgataaattttgctcatctgcaacgtatttaccaatcgtagatttaccggtacccatgaaaccaattaaaattattggtgatttatcatgattcatgcgttttcccttctttcaataacaaaacaatcttatagttatagtcagtttcaatattatataatgtctttaattttaaactatattgactgatataaaaagtgaaaatggaaaaataaattgctgttagcatcaataagaacggcgtaacatatcctttttctttatataaatcaaaattaataaattatttcacatcctttttaatagtactcatttaaatactagtaagttatacataaatagttttagtctgcacatttgtaccgactttaactgttatcgttattttaataatggatttatagtagatatttgcagtaaatgctgtaacattattaatcattgttatatttcctctgtcatttacaactttaataattttattattaattaatttgtattcgatcatttcttcacctttatgtaaaatgatacggtgttgcctaatttcaatatcgtttctatctactcctttaaaatcatctagaatatctcttgagaaaaattcgaaatctacagttgttaaatccctactttcaattagaaaagttttactaagtctaattaagtctggaacaattagtaaagttatacttataaccatcatcgctactaacatttcaatgagcgaaaaagctttgacattaatactgtatacatgtcttttgataagaagtggtattttttgaaatagcacaaatttgttggtcactttgcttaatatcatacttccctatagttacccccttcttaagttcttctttattaattttagatacagtcgtcaaaattactttagaagcatcaattgtttgtagtttatggtttatactcgcttgcatttgattcatcattggtatcaatagtaatgtaatcaatccaattagcaaaaatccagccatactatctattaagaatgaacctttacacttatagcttttcataacgaattcttcctttttcaatatggaatattattctataaattgaattgttattgtaaattgttatgctaccaaatttattgatattcccttttttatcaaaggcaataatatcaacttttgcaacattaattattttgcctacttttaattttagaaatcgtattttattattctctattactttaatagtgtcactgttttcataaaatctaacattgatatatccttgatttgctatagcttgcgacttaatataattcaattcagtaataaaagaaatgatatttgcctcatcatctattactctaagattgcttaatcctttagatgtcattgtcaaaagtagaaatatactgattaacatcattaccacaagcatctcaatcatagtaaatgctgactgctttctaatttgcaactgcttctccattactaattgtgattgtctctcctgatttacatgtcttttgtgcttcttttataaaaccatctgcaattaagtcttcaatagacgatggatttctattatgtttcaatgcatacgcttcaatttgactattaaccatttttacctgtgcattacaacctgttgattgtatgtgagcagtttgtttagcaatatttggaatgattaaaattaataataaactgatgattaataacactaatagcatctctatcaatgtaaacgcttgagttttcttaagaaatttaaacatatattaacctccattattttatactttgcatcatttgaaacattggtaacataattactaaataaattgcgacaataaataaacctaaaatcaaaaataaaataggctgtaaaaactgagtctgttttatcgctttatcttctatttgttttactaatatttgcgaatataactttagttctacttctagcttccctctcttttcaccttgtagcacaaacttaattaattgaggcttaaagcattttagtttttctaaaatttgaggcaaaccatatcccatttctgaataagttaataagtatttacctagaaactgtctaaatggatcactactatggttaatataaacgtctactattgattgaagtgtaataccatttttataaaacaacactaattcattagttacaaaataagttttaaataattggaaatagcctgatattagcggtagtttcatcacaaagtttatcttattgagcatatttaaattgttataaattaatttcataataatagccaacatagatactattatgagcattactacaattatagtaggtaagctggtaatgaaaaaagacaatgttttttgaaaagaagatagttgaatattcatagaagtatataattgttgaaactgtggaattactgtgaggtttaatataataatcatagcaataaagatagaaactagtattaaggggtattgcagtgtctttaacaatcgttgttctgactttctattcactttcatataatttacggtttcttctagaacgtctataatattgccaaatctttctgccaaatatacttgcatgacgatagtatcgctataacctatcagtgataatatttgattgcatggtgcaccatttgaaatttcacttagaatggtggtacctaattgcttatttttatatgtcatttgaagatttaaaaattaaaaactttgatacagagtgaaaccatatttcaacaaattacataaatttgaaagtaagtcgatttgttgggccttacttaattgtcgcttcttagaatgtagtttaaatgtatttatgcattgtagtttcacaaatgacacctgcttttgtcatatcatcaagtttatcttctaagttcttaaatgatgatggtaatgaatgattatgggaaaagaaatatcggagttgttgctgagatagaatttcacatactaattgtcgctgttgcttaatagtagttacaagtcgttggtttataattaagttagttgcctgtatcaattcttgtacagaaatgcccatttctaatagccttaaaatagcacctttacaatcagttgcatgcaatgtagtcagaacaaggtgaccacttaaactagcctgtataacacacttggcaacatctttatctctgatttcacctattaaaataacatcaggatcacatcttaaaatagctttaaacgaatttacatagtttatgccagctttatcattcacattaatttggacgataccaggaatttgcatctctacaggatcctctatagaaattacatttaaattcaaggctttattcgcgtatgagaccatttgatacattaatgtactctttcctgaaccagttggtccactaaacaatagtaatccttgtttcttattcatgaggtgtttaaaatcattgaatttataagttgatttctgtggttgaaaaaattgaggtacaattctgataacacaactttcttggccaagtgacaatggtaaagttgatattctcaaaaaatatattttattgaaaaggtaactatatcgaccgctctgtgcgacttgctgtgtagaaacatcaagcccagcttgaaacttcatataaactaataacttttgataaatgctattcccaatttgttcatactgctccaagttatcattaattctaaatttaatacttacttcatttttaactggaataaaatgtacatcactcgctttcatttctatcgctttattaattatttcttgaaatagaatcttcaaaaaaacacctcctacatataatcacgtaggaggtgtttttattacttcaatttaaccgtgtaaaaatggatttaattgttcatcatcaaccgtcgtatatggaccatgtccagggaataaaggtaaatcgccttctaattcaaatattttatcttgaatagaatcaactagcgtttcataatcacctttatataaatctgtacgtccgattccattattaaataatgtatctccaacaactgcgaattcatcgaacacatatgttaaacttcctggtgaatgtccaggtgtgtgtaacacattaaacttaaatccttctatttctgtgctaccttcgtttaacttttcaggagttaccttacttgtaataattggtaatccatattgcttaaatttatctgccccatttttaacgggatcttttagaaaatcaaactctgcttcatgcatataaaccgggacatcgaatcgatcaactatatcatcgactgctccgatatgatcaaagtgtgcatgtgttaataaaatagcttttaacggtttatttatttggtttaattttttaataattttttcactttcacctgaagggtcaatcagaataacagctttgtcattttcgatgaaatacgtattagtatcaactaagcctaaagttaagcttgaaatcctcataggttttcaccactattttctaaatgtttttgtactgatgttagtttatcattcatttttctagatttgtctcgtcggtcatcaatacggatatttgtacaaactctacttaaacctttatcaaaaggtaattcatgtatcacttgcacaacttctaatacatcgcttaattcaccttcaattagagtattcattggtgttaattgaaaatcaattttacccattgctttatattcttgaagttttttctgaatatctgcaatatatttactaacactcggaccttccgttccaactggaataacaaccacatcaacaatagccattattttaccccctctttatctaatacataggtcttgattaatcctgctgctcctgtaatacctgcatcattacctaatttcgcttgtacaatttcagtttcaaattgagcaggtgcaaatgttaaattatgatattctgttttaatattttcaattaaaataggtcctgcagtagacattcctccacctagaacgatatatttcggattacttgtaacactaataatactacataaatatccaatatagtttgcaaccttttcagtaatgaaaatacagaattggtcaccagcttttgccgcatcaaaaacagcttttgctgtaaccttattttctttaatcaattctaatatagaagatctaaacgtcaacttcggatagtagaagttaactaagttaacaacgcctgtcgctgaagcaactgtttcaatacatccagaacgaccacaattacatttaaatcgttgatcgaagtctgctctaaaatgacctatttctgcgccagagccattatgaccatgtacgatttcaccatttgaaataattcctccacctagacctgtaccaagtgtgatggcaacaacatcatcggcaccttcaccagcacctttgtgtttctcccctaaagcagctatgttagcatcattatctacatacactggacaatcaacgaattgttcaaaaatctcacgtacattaactttttctggccaatataagtttactgctccatttactgtacctttttcaaagtcaacaggacctggtacaccaatacctacgccaagtacatttgaaaaattataattattttcatttactttttcaacaaacgaatcataaattcctttcaaaagtgtatatcctgtactatcagatgtatcagtgtgaatagaccatttatgtaattgttctaattcaggtgtgaaaatacctaatttacaagtcgtcccgcctacatcagctgctaaaataatttttgtcatttctgttcattccttctctgattaattatcaacgtacatttcaaatattcttccttagataacagttcatattgatacaatgatgaaatctcctgttgaatcatttcgtacatatcttctggatttttaaaatatattagaaatccgtaacttttcaataactgttgtacatcataaaagttatttatttttcgactcatttgatttagtcaactctttttctaagttaatataatctgtatttttagggtctgcatttaatgctttacgcacatattttaatgctttttcatcatcatttaatgaacgatttgctatcgctaactcaaaatttaataaacctgatttaggaaacattctaagtcctcgctctcattctgtcataccttcggacttagaattgatagtagccataatcataccacttaaataatatgtttgatcatcggcataatttttatttattgtctgcttcgcaatattttgagcattatcataattaccactagtcatatcatctttgatcaatttattataaatattatcttctttaattgtaaaaattctaatttgaagtgcaataaatataacaagcataccaattagtaaaatccaaaaaatattacgattcactttatagtaatagccaattaaagttattaataaaccaccaatgaatcctccaatatgcgccacaatatttatatttgacataaacagagaaacaccaactaatatcactaatgcaattaataactgtcctaacatttttttgttaaatgtttttgaaacatacatcatcgcaaaaattgatccaatcagaccaaatatagcaccactagccccaactgaaattgtagtcgtattaaatgatagtgatacaaagtttccaaacaaccctgcaataaagtatacagttaacatccgccatgaaccaataattgcttcgactattttaccaaaaataaataatgaaagcatattcataagtatatgttcaaaactaaaatgtaaaaacatcgatgtaacaattcgataccattcaccatgtacgacattaaaatgcactaacccgccaacatctaataattttacatccgaaaaattatttaaatataaaatcatacataaccatattaagacatttacaaatattattgtgtatgttgccggtgaaaatttctgcatatatttatctaaaaagttatcggttaatactttgcgtttatagaacatatatgtctttttatcattatcttctgaaataagtctagccaaaaatatattcggcatatgctttatcaaatcttttgtgtgtcttataacattgaatttaattctaattggcgaaacttcatttaattgttcttctgaaaattccgattctgtaaaataataaaattcaaaactttgtggttcgaaagaaataaaatttgctatttcatctttgtgttcaagcactttcgctttgtcaaaacgtatttcttgggtagacttgatatgttgtttaaaaatgactacttgtttttttcttttatgggctaaccaaatttcttggtcatctttttccctactgacaatatcaaaattcaagtacctaatccaataatatattgttttccaaaattgtttgtctatgttcatttagtcctccactatgctgcttgatatataatcaatttatcgactggttgatcgaatgattccggttcaaatgatgttatttgaaaatcgtataataagcttattgtctttgtctgataattagctaaaaacctgtcgtaatagccaccaccatacccaattctatatccatcgtcttgaaatccaacaccaggaacaacaattaaatctaggttattcgttgtttcaccttttgaagttggatagtaaatccccttattatcgacatcaatatctttgagattaaatatctctttaaaagtcatttgatgatttaaataatccattttcggtacaaaaatacgtttatgatccattaaggcttgttcaataatagaaaaagtatctacttcatgattaaaagaaagaactagcgcaattgcgtttgcttctttgtattcttcagttgcaaaaaattgatttcttaaccatgtgtctgcttttcgcttttcagctttattaaaattcttcattttatgtaaaatgtattttctaatctcatttttagtcacattatcacccactttattcaattctattatatcgttaataacaatacatgtcattatgttgtcatgatgaattatgcgacaattctaaaatttattatttcaattgaaaatcttttatcatttcatacgtgtgcataattaaaaaggtgaaacctcttattttgagatttcaccttttttattgttaatttaaatttaattttaatgattattttgtttcacggtgtaaagtttgtttgttttcacgtgaacagaatttcttcatttcaacacgttctggattatttcttttgttcttagttgtaatgtagtttctgtcaccacattccgtacaagctaaagttacgtttacgcgcatggttattcctccttatcatttctaaatacgactttattattataccaacatctataatatttgcaaagttaaaattttacaaccatgcgctacacaatcgtcaggttaaattttatttgtctttgtctttatttttatcatctttacctaactgcttaaagtagtagttaattacatctctacctaagtctccacctgttaaccatggtggtggtacaggctgatttgtatatacaattgaaaacgctaattttggatcatcaattggcgcgtatcctatataagtagagttaactcttggctctccgttttggaacacttctgcggtacccgttttaccagcagtaggtactactgtatctttaaaactaacatatccagtaccatctttatcattaaatgccattttgaatccttcttgaatttgtttgatttccttttcagtattattaaccttgttcaagacagtgccattaattttcttcttgagtggaccaacctcatctttattagttgattcatgaatcgttaatccaatgtgtggctgtattctataaccatcattcgctatagttgaaacatattgtgataattgtaatggtgtataggtatcatattgaccaattgataaatctagataattacctggattatttgttaatggttcgatttgacctcttgtttcatttggtaaatctatccctgttttcacacctaagcctacttgatttaatcctcttcttagcttttgggcaggtgaacttatgtctgaaggtaaagccataccagaataataagggtctcccgctaattttaatgctgttttaaacatatatacgtttgatgaatgcatcaaagcttgcttatcattaatagttacatgcccgtttttattgaagtatgatcgttttgtcaaaccaccttggaaatgtaatggttcatcgaccattgtttctccaactttgatagctttattctgataaccggctaataatgttccaccttttacagaagatccaaccgcaaattgagaagtaaacgtaccaatgtcataatcagtcattttaccactcttattaatctgctttccggcaagcgcaagaatgtctccatttttaggattttgtacaaccatcattgcattatccatatctttggcaccttgactgcgaagcttcttaatttgtttatctaataatgcttctacttctttttgaagatctatatcgatcgttaatttcaaatcttgaccgcgagcgccaggatttaacacttctgaagatgtaactttaccagatttgtccgttgtgtatttcatttctttcttcttaccacgcaatacatcttcatattgatattctaggtaagattttccaacacgatcattgcgtgaatatcctttggataagtaatgttctgtcaattcttttggaataccttcagcaggtgtcgatacatctccgaatatacctcttaaagtatcgccatatggatattttctatcccaatccatagacgtgttaacacctggtaatttggaaagttgctgagaaactgctgcatactctttttcactgacatcttcattttttatcatttgtggatctaaaactgttcctgcattcatctctcgaaaaatagctaaaacttgtaaatctttagaagacaattcatctaattgtgattttccgattttcgataacagttgtttatcatattgatcttgtttaatacttccatctgctaacatagcttgttcttttgtcatcattgcttttgcttttttaggatgcaactgaatccagaaatctttcttatcacgttctgtaattttcttagtatccatcttgattagctttgataacttttcagccgtatccaacatttccgattgtgttgtttttcgacccctagtatatgtaatagccattttagaagcattatcaactaaaactttcccatttctgtctaaaatacgacctcttggcacagactcattcactgtaatgttttcatcattttttataatttgtttataatgtgagccttgtgcgatttgtaaataacctaaacgtagtactagtactgcaaaaataaatacaatcacaccaaatataaagttaattctcttgttaattgtattttgaacgatttcatcatttgatttttcttttagtctttttaacaaaactacctacctctattcaaagtctttcactttaaatcatatatgaatttagaaattatttctatctttttgacaaaaaaataacggtctcatttaagagaccgaacaagtaatcatactttattttgttgcattatataattcgtcaactttttcccagttaactacattccaaaatgcgccaatgtagtcagggcgtttgttttgatattttaggtaataagcgtgttcccatacgtctaaacctaaaataggtgttttaccctcagttaatggattatcttggtttggtgtagtcacaatttctaactggccattgtttacgactaaccaagcccaacctgaaccaaagcgtgcagctgctttgtcagcaaattcttttttaaattcttctaaagaaccccattgttctttaattttttctactacagtacctttttcttctgagtttggtgaaagtaactcccagaataatgaatggtttaaatgtccaccgccattattacgtacagcagtttggatgttagctggtacactgtctaaattagcaacaatttcttcaatagatttagattctaaatctgtaccttctactgcagcatttaatttcgtaacatacgtgttatgatgtctgtcatggtgaatttccatagtttctttgtcaaaatgtggttctaatgcatcaaatgcgtatggtaattttggtaattcaaaagccataaataatcatcctcctaaaatgtctgtaagtaaataataacaagcagtgactggttcaacaaagaatttgcttaaattctactacttattattttctctactcatttaatataactcaaatcaaaaataattaaacattttgtatataaaaagttaacagatttgccataaaatcatacgaacggagtatgaaatgaacctttatcttctataatttaaaaaatgagatttatgcatacatcggaccaaatgtgcataaatctcatttctttatattaatcttggcaagactcacatacaccataaacttcaagtttgtgtttgtgaatattaacaccaggtagtgataattttatctgatctattggacaataatctattacctttgtatctccacacttttcacagataaaatgatgatgatgatggtttgtacaagcgattctaaacttcatttcaccatcaagttctgtattttcaataattcctaaatctttaaataagtgcaggtttctatatattgtgtcgaatgaaattccaggataattttcatccataacttgttgtatatactttgcgtttatatacttatcttcttcgacaaaaatatctaacatatctttacgtttatctgtatattttaaaccgttctcttttaaaattttaatagcatcatttgtattcattgatattagctccctttttaaacttcattcgcattttctgataagccattgtaatcataagtaaaataacaagtagaactacaattacaccacccggagaaatgtccatatagaaagctaggactaagcctaatattactgataattcacctaaaaatacacttagtaatatcaattgcttaaaactttttgttattcgcatacttattgcaattggtaacgtgattaacgcacttactaacagtatccctacaacacgcattgaggcagaaataaccatcgctacaataacaataaataaaaattgaatccatttaggaatgccaatgactttactatattcctcatcaaatgacaatataaataattctttataaaacaatgtaataaacagaacaactatgatggcaatgacaataatcgttgttaaatcacttatattcactgcgcttattgagccaaatagcaatccaacaatttcttgattgaacccatcagctaatgaaatgaagattgcactcaaggcgataccagcactcattataattggaatagcaatttcttggtaagcagtgtatgacgttcttaatttttcaattagaagcgcacctactattgcgaataagattccaaaccacattggattaataaatactagtgttggcataatagtaagtaaaaacataccgaaagatataccacctaaagttacatgacttagagcatcagctataagtgatagtcgtctaacaacgataaaagcaccgattagaggcgcaataaaacctatcaagataccactaattaaagagtacctcataaaatcaaaattcaataatgcatctatcaattgtgacacgcctttccattttaaataaactcaaatctttattaattacaacattctcgattatgctgatgatcgacaaaacgtacaggatgtccataaatttttgaaatttcaacttcatcaagtgatttaaactcatcagttgtaccatggaaatgcaaatgcttatttaaacatgctacttcagtagcagtatctgctacaacaccgatatcatgagtaactaagataatggtgataccttcttgttttaattgatctaaagtattataaaattcacttacatgttttgcatcaataccattcgttggttcatcaagtactaatactgcaggttctgaaatcaatgctcgagcaatcattacacgttgttgttgaccacctgataattctgctatatttttatgaattaaatcacttatattcagtctttctagtactttaatcactttttcattatctttgctattaaatgtttggaaaagacgttttgtctttgttaatccgcttaaaacaacttctttaacacttgctgggaaacctgaattaaaggcatttgctttttgtgatacatagcttaatttaattgatgttttcttatttttaaaatcaataccttcaacaaaaatctcaccactttgtaaaggtaataaccctagaatcaacttcaataatgttgatttaccagcaccatttggtccaacaattgctaaaaattcacctttatttattttaatgtttatattttctaacacttttttatgatcatagtagtaattgacatttttcaattcaaagactggtgtcatcgtattctcacctcgcattcaactatacaactcctagtaacatatgtaaacagtaatgtttacgactcaaaattagacaaaataaagagatatgcccccttcaagttttatttatcgcatttcttgaagagagcattatcattttattgttgcataaccttattttttaattctgggtcaaattgctgttgttttaacatttcaatttcaagtttatatggcggttttttatttttcttatcttcaccaacataaggtgtttctaagattttcggaatatctttaaaactatcatgatgcacaatgtaatttaatgcatcaaaaccaatgtaaccgaagccaatattttcatgtcggtctttttgagcgccacggtcatttttagaatcattgacatgaacaactttgattctgtcgactccaatgattttatcaaattcatttaatacgccatcaaagtcctctttaacattatatccagcatcatgcgtatgacatgtatcaaaacatactgataaacgttcgttattatgaactccatcaataatacgtgctaactcttcaaatgagcgaccaatctctgtacctttacctgccatcgtttcaagcgcaatacgtacattattgtcattcgttaaaacttcatttaatccttcaataatcttattaattccggcatcaacaccagctccaacatgcgcacctggatgtaatacaatatctttagcccctatagcttgcgttctttcaatttcttgttgcaagaaatctacaccaagattaaacgtttctggtttggttgtatttgcaatattaatgatgtatggtgcatgaacaacaatattagataaaccatatttttccatcacttcatgacctttagttatatttaaatcttcaatacttttacggcgcgtgttttgaggtgcaccagtataaatcataaatgttgtttcaccatattcatgcgcttctatagcagaaccttctaacatctttttaccactcattgaaacatgtgatcctaataacataaaacacacctaaccttttttgttttgcttacgtttttgtctattttgctgcttactaaattgcttacgctcttgacgtttcattttttcaacttcttgtttaaatttcttcttataacctggtttaactttgtttttaattttacttcgaactttgttcttcacttgattagttaaatggtcatctttgcgcattcttgcttgacgctgattgtgcgctttaacttcttttaactcaccatctttaatatcaacagtattgaatacaaaaccgcgatcttctattaatgaaatattgtgttcttcatcaggactataaagcgtaattgctacacctttataattcccacgaccagttcgtccgactctatgcgtaaagaagtcaatatcatttggcacatcaaaattgatgacatgactaacaccttcaatatcaataccacgagatgctaaatcgctggcaataacgtattggaattctaaattacgtatacgtttcatttgttgtttacgttcacgtggcgttaagccaccatgaatcataccaactttaataccagcttcatttagtgaacgtgctaaatcatttgcattatctctactattacagaaaataatacataagtatggatttagtatatcaattaaatttaaagtcttttcaactttagctgcacctttagtaggtattaaatagaattcgatgttctttttattttgttttttactgtcgacagctacatattctggatgacttaaatatttatttaaaaatggttgtaactgttgtgggattgtagcactaaacaccgcaatatttgcattatcttccaatcttgcagcaatgtaatctacatcttcaattaatcctaagtcaatcataagatccgcttcatcaataactaaatatgatgctaagtgcacatgtaaatgtcccgttttagctaagtcattaattctagtaggggtgcctataatcaattgtggttgtgcattacaacgttgtctatctttctctatatctgtaccaccaataaaaactttaactgaaacaccagctttaaattggcttaaatggttcgctgcatcgtatagttgttgtgcaagttctcttgttggtgcaactacgattgcttgtggttcttttatttcactatcaattaactgcattaatggtaataaaaatgcatgagatttccctgtacccgtttgagattgaccaattaaatttgttctctttagtattcttggaataattcgattctgaatttcagttggtttttcaaaattaaggtctttcacagcgtcaattaaactagattctagattaaattgttcgaatggatgttttgccatgatttggcctccttatatgttcatctttactattataaagtataaatgtgctattttaaataaaaatattaaaacctcgaaatttcaaaatttagaaatcccgagattttagtttaaatatattgaaatggatctgtattaattgtagatgcttcaacatctaaatttattttttctgtattgaaccaattcattagtaacgcttttaaaccttctttcatcacatattcgctgtaatgattaatatcaattaaattcacaccatgaattttagcatctaaggcatcatgatgtttaatatcacctgtaacaaagacatctgcgccttgttggacagcttgatattcatatccaatacctgaaccaccaataattgcaatacgtttaattttctgattagactcaccaacaaaacggacacttgggatatttaatttagatttaatatcagctgcgaaatcttccaatgtcatttgattatccacttctgccataacgccaagtccataaagggatgtttgttttatctcaataaaatcaaataccggtgtttcatatggatggtattgtttaattaattgctcagcccttgacttttgatatgcatctatcataaattcaattttaacttcatctacatattcaattttatcaatttgtcctattgttggattagcttcaccaactggtttgaattgccctcttccttcactttcaaagaaacaatattcataattaccttcttgcgctaatccattttcactaagcttatctttaaatggtccaacattatccttaggtatatatgtttgaactttatagtatacatcttgttgattatttattattgaaatgttcttcaaacccatcgccttcgccaacatcatattgacaccatacggatttacatctaaatttgtatgcatcgctattaaattaatgtcatgttgaattagttttctaatgatcaaaccataaccattagcttttaatgatgttacgcctttaaagattagaggatgatgactaataatagtattataacctttttcgattgcttcatttactacttccaacgtacagtctaatgctgttaaaacaccagtaacttcaacatcttcatcacctattaacaatcctacattatcccaagattcagcagtactaaatggcacatgatgatctaacaatgtcattaaatcagctattttcattactataacaccctttcaattacagcaatttcgtcattaatttgagctaaacgttgatgatgttgttcagtattgagtttcgatttaatatgataaagtgcttctaactctctttgccatttttttataaaatattcatttttgttgttcagcaattttggtccgaatttcaattcatcagatgatagctctattaattctgtagaatattctgctacaacaatttcataaatatggcctttttcttccattattatttcatcaattatttcataattcaattgttgtaatgtttgtcttaaattttcagtttggatattactttgtaaaatcaaccttggatgttgacttaacttatcttgcccatcttttaaaattttagcaataagtggtccgcccataccacaaattgtgatattatcgattacgtcctcaggttgaataacacttaagccatcccctaaacgtacatcaattctatctactaattggtttgcagctacatttttcacagcagcttgaaaagggccttgaataacttctccagcaataccgcattcgcataaatggttttgaattgcatagattggcaaataagcatgatctgagccaatatccgcgattgtaccttgttttaaaaatcgacttaccgtcgttaatcggttatttaacgaaatcattttattctcctttatgaaaaaagaggttgaacattattcaatgtaccaacctcactcaagttaaatcttaatctaaaaataaataagcgcttattcatgtcttggtatcaatcattaaaattgatataaattaatccataaagtctttcaaacgtttactacgacttggatgtcttaattttctaagtgcttttgcttcaatttgtcgaatacgttcacgtgtaacaccgaaaactttaccaacttcttcaagtgttcttgttctgccgtcatcaagaccaaatcttaatcgtaatacattttcttctctatcagttaatgtatcaagcacatcttctaattgctcttttaataattcataagcagcatgatctgaaggactttgtgcttcctgatcctcaataaagtctcctaaatgactatcatcttcttcaccaattggtgtttctaatgaaacaggttcttgcgcaatttttaaaatttcacgaactttttctgctggtaaatccatttcttcaccaatttcttctggtgctggatctcgacctaagtcctgtaataattgacgttgaacacgaattaatttattaattgtttctaccatatgcacagggatacgaatcgtacgtgcttggttagcaattgcacgagtgattgcttgtctaatccaccatgttgcatatgttgaaaacttaaatcctttgttaaagtcaaatttttcaacagctttaataagacccatattaccttcttggattaaatcaaggaataacataccacgacctacgtatcttttagcaatacttacaactaaacgtaagttcgcttctgcaagtcttgattttgctacttcatcaccttgttcaatacgtttggctaattcgatttcttcttgtgcacttaataagttaacacgcccaatttctttaaggtacatacgaactgggtcatttattttaacacctggaggggcactaagatcacttggattcagtttctcgtcagtatctgaactatctttttcattaactagtgaaatatcattatcatttaattgatcaaagaaatcatccatttgatcagagtcgatatcaaaattctgaagtttttcagcaatttcttcatgacttaaatgaccctcttttttacctttttcaattaattgcttcttaacatcttctaatgttaatgtcggatcaattgtttgttttttaattttaactgtgttatcagacatgaaacggcctcccgattttaaatatgaacattcgaaatttattcaatattgctattttaaactaaattcttaattaattcatccatatttttaattttattttacaaattggaactaatcccaatatttatttttcaatagtgttgtttaaatgcggtaactatcatttacccttatacattttgacataatcattattcgtattattctttaaaatcacatgctacatgcgttctttattcttagcaacaatttgctgtaaatagtatttttgtaattctacatcgccaatccttgtagcttcccttaatttatgattcaatgactcaattgtttcttgtcctttttcattaataacattgacataatcatcaatttcattttcatatggttcgtcattcaaattatattgttctaagctaattagtgtttctctcaactcatttgaattaacatactgcacagcatcactgatattatattgatcattttccgcataaaaatcatgtaagacttcgaatacatatttaaaatgctgatttgtgaagttatccttatcaacactttcataataatttaaaaatgtatctttatctctcattaaatgttttaaaaatgctcgctccgctttttcttgacggctcaaattgtcaaattgtgccataccaattggctcaggttcaatgtaaccgccatactcatcttctggataataattggctggtgcttgattgaattgtatttcgttagctaattgctcaggactaacattgaaaaatggtgcaacatcatttaaagccttttgttgcaaaatcgatgatttcataagcgaaatatcatgacttagttctttcaaataacgttcatatgaaaggtcattatgtgcaatttcatcttttaatatactcactttataatgtgcaaatgactttttgtcattttttacaaaagcagtaaatgcatcgttgccatacttaccaatgtattcatccggatccatgcctgatggcaattgtataacaaatacatttagcccttgctgtaacaaattttgacctgttttaagtgttgcttcactacccgcaaaatccccatcaaacattaatgttatatttgatgttaactttcgtataaaagtaatatgttcatctgacaactgtgtacccattgttgcaacaacgtttttcaagccagcagtatcagattttataacatccataaaaccttctagtaatacgatttcatctaattttctaattgatttacgcgctttatctaagttgtataacaactttcttttttgaaagataggtgtttcaggactatttaagtattttggttcttgaccggtatatgttcgacctgaatatccaacaattcttccttgcgcatttttcaaaggaaacataatacgatttcgaaatctatcgtaataactgaaattttcttcgttacgtgataataatccggcttcatatgctaattcaatatcgtaaccctttttttgaagaaaatcatgacaaaaatgtgagctatcgggtgcaaagccaatgcctcgctctttaataagcgcatctgtaaaaccacgttcttgtaagtacgttaatgcttgttcgccttcgactgtctttgttaaagcgtaataataaaattcttgtattaactcatgcatttcaatcatttgtaaatcatcagaagcaatttgaacatttgagttagattgtgttgcctcaatatctacagcaacattaactctatcacctaattctttaaccgcttcaacaaatgatatgtctttaatttcttgagtaaattgaaaaacattgccaccttttttacaaccaaaacaatgacaaatttgtttatcttcagaaactgtaaatgaaggtgtcttttcatcatgaaaaggacacaaacctatataattgcgtcctctcttttctaattttacatattcacttaccaagtctaaaatgtcggttttatcttttatttcattaatgatcgattgatctattcgcaaattaaatcacctattaagcattagttatactattatacctaattttcgacaaaaatgaaatcatttcgatttattttgttcaatataatggattatatcgtttgctgtttcttcgattgctttttgagaaacatcaatgacaggacatccaatttcacttacgatttcttcaaagtaattcaattcttcttgaattcgtgcttctgttgcatatcgagctgtgtcacctagtcctaattgttttagtcgctcttttctaatgcgatttaatttttcttcacttattttaagtgcgatacatttctttggattaatatcatataagccatctggcggtgtcacttctggtacaatcggtacattcataactttgtaactcttatgcgctaaatactgagataatggtgtctttgaagttctcgaaataccaagtaaaacaatatcagctttaggtaatcctttaggatctttaccatcatcatatttaactgcaaactctatcgcatcaattttcttgaaatatgcatcatctaatctatgaacgatacctggctcattataaggtttttcttcaaccgaagcagataataaatccattaatggccccatgatatcgacagacttcaattggaattctgctactttctcactcatatattgcttcatttcaggtttaataagtgtataaacaatgatagcatttgtatcttttgcaacttgaatcacttcatcaacatcttcaaaagattcaatatatggatatcttaataattcatttttacattgcttaggattgaattgtgaaatacctgccctagcaactaactctgccgtttcacctatagaatctgaagctacgataattttaattttttccattacttctcacctattctttatataatgctactaataacttagctattgttgttttggaaattcttccaattacttcatacttttgattatctttttttcttacaattggaatcgaatcaatttctttttcaatcattctatctgctgcgtatatgactaattcgctttcctctaaataagtgacattaggcatacgtgtcatatttacactgataggtactttatgaatatctgctccaatcattgaagctcttaataaatcttttcttgaacacacaccaacaaaatcgttatcttcattaataataaataatgtacttacatcttctaaaaaaattgtacaaatagcgtcataaactgttgtattctctcttagcacaacaggttgagacatatagtccttaacctcaaattgtcgaagtttttcattaaaaaatttgccttttgatttacctgaataataatatccaactcggggacgcgcttctaaaaaacctgacattgttaatatcgctaaatctggtctaagcgttgctcttgttaaattcaacttatctgctatttgttcaccagtaatgggtcctttagttttaacaatttcgatgattcgttcttgtctttgactgagttctataggtcttcaccccttttttattcacctattattataccgatatttctttcatgtcacaaacacattaattttacttgcctttaaataatctatcaattagaataaacgtacagcgagttaaggatagtgtaagcttaacaataagattggcgcaacgaatcattttaaaataaaagcgagtgactacactaatttgggtggaaccgcgggttaaatacgtaacttattttgtattatatacaatttaaaatattaactcgtcccatggaagtaaagcatatttactatgctgttattttccatggggcgttttcatgtatgaggagaggtaattatggcaaaagatatggatacaattgtttcattagcaaaacacagaggttttgtgttccctggtagtgatatttacggtggtttatcaaacacatgggattatggtcctttaggtgttgaattaaagaataatgttaaaaaagcttggtggcaaaaattcattacacaatcaccgtttaacgttggtatcgatgctgcaatcttaatgaatccaaaagtatgggaagcttcaggacacttaaacaacttcaacgacccaatgattgataataaagatagtaaaattcgatatcgcgctgataaattaattgaagattatatgcaagatgttaaaggtgatgaaaacttcattgccgatggtttaagttttgaacaaatgaaaaaaattattgacgatgaaggtattgtttgtcctgtaagtaaaactgctaactggactgaaattcgccaattcaatttaatgtttaaaacattccaaggtgtaactgaagattctacaaatgaaattttcttacgtcctgaaacagcacaaggtatttttgtaaactataaaaacgtgcaacgttcaatgcgtaaaaaattaccatttggtatcggtcaaattggtaaatcattccgtaatgaaatcactccaggtaacttcattttcagaacaagagaatttgaacaaatggaacttgaattcttctgtaaacctggagaagaaatcgaatggcaaaattattggaaaacttttgcaagtgactggttaacaagcttaaatatgagcagtgaaaatatgcgtttacgtgatcatgatgaagatgaattatctcattactcaaatgcaacaactgatattgaatataaattcccatttggttggggtgagttatggggtatcgcaagtcgtacagacttcgacttacgtaaacatgctgaacactctggtgaagatttcagataccatgatccagaaacgaacgaaaaatatattccatattgtatcgagccatcacttggtgcagatcgtgtaacattagctttcttatgtgatgcatatgatgaagaaggcgttgaaggtagtaaagatgcacgtacagttttacacttccatcctgcattagcaccatataaagcagcgattttacctttaagtaagaaattatctggcgaagcgattaagatttttgagcaattaagttctaaattctcaatcgatttcgatgaatcacaatctatcggtaaaagataccgtcgtcaagatgaaatcggtacaccttattgtgtaacattcgactttgattcattagaagataatcaagttacagtacgtgacagagattcaatggaacaagttcgtatgccaatctcagagttagaagctttcttaactgaaaaaacaaaattctaattaaaaagactttccaccatatgtggtggctatataatttataaaaagagatactggttagtaaaattgccagtatctcttttctattcaaaaaggtattcaaataaacacatctatgtggctacttgaataccttttattattttatgttattgttccaatctttttaattggttgattagtttctgacttttaaaaaacatacctgcatattcacgatataacattaaaatgatatctgacatttcatcaataatttcttgatggatattcaatgaattcattttatctatcggtaatttttgtaatacatctaataaatatagtgttttattcgataatataactgcatgtacatctttagaagcctcttgccttgaaatcgcaccgtcaaacttaaaactataacctattaaatctgcttgtgtgtcattaccactcacagcacagcgattaaatgatgcagtaaaaccaaatcgtttcatgcactttaacataactacgactgacattaactgtgcagatgtacctgattctattttttcaagaacaaattgtaataattgatagttatatggtgcaatgtcaccttcatccattgagcgctcaatagtttcagctgccagagcggcataactgcttacgtaaaggtccatttgtaatttataatgttgactaataacatctacagaatttaacgttcccatacctcgccactgattgtaaataaacaaaccataaacaaacaattgcgtttgcgcttgtaaacccgtcttaacttttttagcacgtcttgccataagtggtacttttgcaccatgctcatttaaaatcgtgataattttatcagattcaccataatcaactgctttgatgataatccctttttggcgcattaacaattatcttcaccacttttaagattaatcttggtcttcaacataaccaatttggcgaataaagttaactttgtttcgccagtctctttgaactttgacccataattctaagtaaactttagagcctagaagcatttctatatcacgtctcgcacgttttcctacttcttttaactttttaccgccttttccaatgacaattcctttttgcgaacctctttcaacatatatagttgcttcgatatgaacacgatcttcgctttctttaaccatacggtccacattaacaccaatcgcatgagggatttcttcacttgtaagatgaaggattttttcacgaatgatttcacccactacaaattgttcaggatggtctgaaatttgatcatctggataatatttaggtccttcgggtaaatacgtctttaaaacatcaataaaatgatcgacatttagcccttctaatgctgaaataggtacaatctctgtaaagtccatataactttgatattcttcaatctttggcattaattcatctggatgcactaaatctattttatttaatactaaaaatactggtgtcttaacatttttcaacatttctataatatattcatcgcctcgtccaatttcctcattggcattaaccataaacatgattgcatctatctcagataatgtatttttagcgactttcatcatatagtcacctaatttgtgtttaggtttatgaatacctggcgtatcaatgaatataatttgcgcgtcatctcttgtcataacaccttgaattttatttctagttgtttgagctttatcggacatgattgctattttatggccgatcactctattaacaaatgttgactttcctacatttggtctacctataattgaaacaaatcctgatttatgttctgtcatttattctaaatcctttcctgaaaatccaaatggtagtaactctgcgactgtcatcataaccatatctcctttatgatttgtcatatacacaggcatatcatcatcacataattccttcaaaacttgacgacatgcaccacaaggtgatgacggtttatctgcatctacggttacagttattgattcaaaatcacctggtctgtatccttgagaaattgccgataccaaactagctcgttcagcacatatcgataatggataagaagcattttctacattggtaccataaaaagttctaccgtctttcgtttttaaataagcccctactttaaattgactgtatggcgaatatgattcttgttgtgcttttctaacttcttgaaaataatgaggttgataactcatatatgcctccctaaaataacgctataaaatgtggtaaaaatactattaaacctataataaatgctaatattgaaactataagtacactaaaagccgcaatatctttagcgtatttagctaaatcatgatattcaacggtcactaaatcgacaacatattcaatagcagtgtttaaagcttcaacagtgagaactaatgcaatagcaatgagtataaatatccactcaatccgattaatatttagtacgagaccaaagacaatagcaacaatcattgcaaacacatgtaaaagaaatttatagtctttttgaattaagattttcagcccatcaagtgcatatttaaaccttttcataattagtctcgtgttaatccatatgcgtttaatattgtatcttgtcgaccaaacatttccttttcatccgcttcagtcatatgatcataacctaatagatgcaaaaatccatgtaatgctaaaaatcctaattctcgttcaaaagaatgtccgtaattgtttgcttgttcttgcgctacatccgtacagataattatatcccctaaaacacgtggtatatcaagaccactaaaatcaatctctggctcatcttcttctaaagcaaatgagattacatctgtaactttatctttatctctatatgttcgattaatttcttgtatttcttgtttatctacaaatgtaacagaaagctcagcatcgtcttctatatgctcttcttttttagcaaattctaataaatcttcaatttgtttataccaagcatctttaactaagcctgtgtgatcgctaaaatctatcgtaaacatttaattctctccttcataatgttcaatgatcttacttaccaatggatgtctgactacatcgctctgatctaatttcaatatacttatacctttaacgttgtgtaacctactgaccgcttccttaagtccacttttaacacctttaggtaaatcgatttgagtttggtcaccagtaactaccatttttgagccaaaacctagtcttgttaaaaacattttcatttgcgcatgtgtcgtattctgcgcctcatcaagaattacaaatgcatcttctaatgttcgtccgcgcatatatgcaagtggcgctatttcgataatgcctctttcaataaatcgctctgtttgttcacgcccaagaacagtatatagaccatcatataaaggtcttaaatatggatctaccttttctttcaaatctcctggtaaaaatccaagtgactctcctgcttcaacagcaggtcttgttaatacaatacgtttaacagcacctttacggagttgctttgctgcataaactacagctaagaatgtcttacctgtaccagcaggacctataccaaatactaaatcattatttttcatggcattaacatatatacgttgccccatcgttttcgcacgaatcgtcttaccaaatgcatctttagttatctcttcatcatataaatctaacagatgttgaattgtgttattatgcgccattttaatagctgcttcaacatctttaattgtaatattattacctaaatcaataaccttcagcaaattgattaatactgattccgctttttctacgttttctatttttgtacctttaacggcaacttcttgtcctcttgcatggatgacaacatcgaaactctcttcaattgcttttaaatgttcatcattatttccaattaaagcttgagattggttcatatcgtctatttgtataattccaggcatacacgcgctccttttcatatatcatttatattcattctatgatgctttaatatctacttaattatatcatgcaattgattgatttaaacatctttgcattgacttactcatttttctttaatttaaaataatcatttatacttttcaccttgtcataaaagcagattcaattttagactaatcaattttttgctgtaatttaaataactaatatttctcgaaaaattctctttgttttttaattttccttaacgtaaaaaaacaagcaactaccattacgatagtgcttgttttcaaaaaattttataattgttttggtttagctaaaatttctgaccatatcataccattgattacttcatctttatcaaattggaacgctgatttagtcaaatctttttcgacattttgagaattaagcagctgctttaatttcaaacgttttgtacgttcagataagtatttatcctcaataatatctctagcacgtttttccattttagcaatttgcttttctttttctctatcaatgtcagtacgaatcgttttaatatcatctctaagtgatttttctaattgacgtctaatttcgtcagaattatcttgtctagaaggtctatgtttctgctccaccggttctgctttaggcactgtgattggtttctctgtcatcggttttgtttcttgttgttttttaggtgccataggttctacaacaggtttcgatttaggctcttcctttggaagttcatcgaataaaggtggtaacgtatcatcatattttcgtttcgatgatttcttttcttcttcatttaattcttcacttatttctttaaacgttcgctcaatttcttcaaaaaagccacctttttttggttcattatcggtagatgttttttgaggtggcttttgattttgtctatctttatgactattttcgcgcatagtagtaatgatagaaatgatcactgatatgacaaaaattagaataccgacactcatttaatcacctctcgacttaatgttcaggtgactcatcatcactttgatcagttcgtttattaattgcatttctcatgcctgtatcagcttcgatatttttcaaattataataatctttaacactgatattacctgaacgtaatgcttcagccatagctaatggtacttcagattcggcttcaactactttagcatgcatttcttgtacacgcgctttcatttcttgctcagttgctacagccatagctctacgttcttcagcttttgcttgtgcaatatttttgtctgctaatgcttgttcagtttgtaagtctgcaccaatatttttactaatatcaacgtcagcaatatcaattgataaaatttcaaatgcagtacctgaatctaaacctttgcttaaaactgttttagaaatattatctgggttttcaagtacttctgtatgatgcttactagaaccaattgttgaaacgataccttcaccaacacgtgcgatgattgtttcttcaccagcaccaccaacaagtcgagcaatattagctctaactgtgatacgagctttggctttcacttcaataccgttcattgctacacctgcgataaatggtgtttcaatgactttaggattaacagacatttgaaccgcttctaatacgtcacgtcctgcaaggtcaattgcagcagcacgttcgaaaggaagatcaatgtcagcacgttgtgcagcaatattagcgtcaacaactctgtcaacatttcctcctgctagataatgcgattctaattggtttgttgttaatgctagtcctgctttgtgcgctttaattaatggcgctataacttttcttggagatacacgacgtaaacgcataccaaccaatgtacctataccaacatgaacgccagctgctaacgctgaaatccataaaccaatgggtacaaatgagaataaaataagtaatgcaactactataataactgctattacgataaaacttaaactaaacatggtatcgctccttttaattaatctacttccctcacaactactcttgttccttcaacttcaaggatttttaccgttttattgcgcaaaataaagttgccatctgaaacagcatcaatacgttcattttcacaaaaaataatccctgcaggtcgaagatctgtaactgtttgagcagtctttcctacgaggtgcgagcggttatcatgagaattgtaacctgactcagaattagttgaatcttttaagataactttatccaaaaacggaatctttctgttgaaaatcttcactaatatcacccattctacaatcgttaaaatcaaggcaacgataacattcgcaagcataaatagcaaattatcaccgagcgttgttatgcttatagttatcagtatcatgccaataataccaattactgcaccaactacaaataattcaattacaactaatataacgccaattgagaatattaagatagaatgcatattgacatttccttggattagaaatcccaaaaataaaataagtaatgataatgtggcgataataccagctgcattgatttttttagagtaaagttgatatacaaatcctaagaatgtcaaacaggttaatattaacgtaaaaataggttgaacaattatattgctaacttgttcaacccaagtatctccagccgttgattccaagatagttgtcatttgtaaaaaattattataactcacaatttcacctcgccctcacattaattatacatgaaattgaatatactttatagttataagaacctatagaatatcaatttgattatttataaactatataactttttttaattaaaaattgacaacaaaaaaacatcacatattagtgtcagacactaacttgtgatgtttgttttatataattaatattcgtgttgagggagtcaacagaggtattaattatttgaatttacgtttacgtgcagcttctgatttctttttacgttttacgcttggtttttcgtaaaattcacgtttacgtacttcttggattgttccacttttagaaactgaacgtttaaatctacgtaacgcatcttcaagtgattcatttttacgtactactgttttagacatctgtatttccctccctccaaatatcaacggaactttatagtcaattgcacagtaaaactatgcatttataagtataatatatctgtaatttatggtcaattagtaaattgttttttatttgaaacatatttcacatcaaaatcacaaagacttttagattttgttctaaaaatctcttaataatttatttaatgagaagagttgcttatatagtaaattgtgaagccgttaaaacaacgttacaaaacctatatctttaatacggaaccatatggtatgaatcaaggaatacttaaactaaaacttctctatcagatttatttgttgcgaaatcaacaactttaattgcttgcccttcatttaatggataatttgcttgcgtaattttaacttttacaatttgacctatgagtgattcgtcaccttcaaattgtactttcatataattatctgcatatccaactaatgtaccttctgtgtcaccctgttcctcaggaattacttcaagcacatcttgatcaaatttagacgcatataactttccgagttgattgcttagcgtaattaacttatgcacccgttcatttttaatttcttcatcaatttggtcatccattcttgcagctggcgtgccaattctaggagaataagggaaaacatgcagttcagagaacttatgctttacgataaaatcatatgtttcttggaactcagcttcagtttcacctgggaaaccaacaattacatcactcgtaactgccaagtctggtaaagctttatgcaattttgttaatcgttctgaaaatctatccattgtatacttacgtctcatacgttttaatactgtatctgaaccagattgtaatggaatatgcaaatgacgcacaacttttgttgaacgttctaaaacgtcaattacttcatctgtaagttgacttgcttcaattgaagaaattcgaattcgttctaatccattaatcgtttcaagatcacgtaataattgggccaagttataatcttttaaatcttgaccatatccacctgtatgaattcccgtcaatacaatttccttatatcctgaattcactagttgcgtcgcttgttcaactactttttccggatctcttgaacgcattaagccacgagcccatggaataatacagaatgtgcagaagttgttacaaccttcttgaatttttaatgacgcacgtgttctatctgtaaaataagggacatctaattcttcatatttacgatttttcatgatatttccaacaccattaattggttggcgttctttacggaattcgtcaatgtaacctaatagtttatgtctatcttgtgtaccaactactacatcgacaccaggaatttccataatttcagctgatgaagtttgcgcataacaacctgttacacagattacagcatcaggattttgtcttattgcacgtctaattatttgacgactttttttatcacccgtattcgttactgtacaagtattaataacaaatacatcagcattcgcttcaaagtcaacgcgctcatagtttgcttctttaaataattgccagattgcttcagtttcataatggtttactttacaacctaatgtgtgaaacgcaactgttgacataaatattcaccccattaattctttttcataacttattgcacttaacgcatacaatggcgcagtttctgcccgtaaaattctcggcccaagaccaacaactgtactagtattactaaataatgaaatttcattttctgacaaaccaccctcaggaccaaaaatcatcaacactttatcctgagcattgaattgttgtaaagtttgcttgaaattgcttaactcaccatcttttgcttcctcttcatatgcaataagaatatagtcataattatcaatagtatcacaaattaattttaaattcgactcgaattgaatagatggaatcactaaacgatagctttgttcagcagcttctttaattattttttgccaacgctctatctttttggcaacttttgcctcgtttaatttaacaattgaacgttccatgctcacagctataaatgatgaagcacccaattcagtagctttttgtagcaaccactcatatttgtcagctttgattagtccactgcaaatcgtaacatcaactggcaattctgtattaatattttgtttttcttttaaatcaacttcaattttatcacttgttatgtcagcaatttcacataaataaactgtttgatcattaaaagttaaaataattttactaccaacatcatatctcattacatttgttatatgatgaatatcttctttttttgtaataaaaaaacgctgacttacatcagcgttttggtctatgaaataacgttgcacattattcactcactttctggccaacaagacaaacccaaccgttgtcatgttgttctgaaataattttaaaacctacacgctccatatgtgactgtataccttcatacttctcttttataataccagaagtaataaaataaccgccttcatttagagtattataagcatcttcaatcatttcatcaataatatgcgctaaaatatttgctattacaatatcaaatttttctgtttcgtctttcaataagttacctggaacagcttcaattaacgtttcacaatgatttcttctgaagttttctttagctacactcactgccatttcatcaatatccaacgctttaatacgttttacaccgattagatgacttgcaatacttaatatacctgagccagtaccaacatcaattactgaatgctgtggcaatacatatgtttctattgccttcaaacacatacttgtagtcggatgatcacctgttccaaaagccatacctgggtcgagctcaatgcaaagctcttcatccgcttctttagcatatgtttcccaactaggaactattgtgaacttcttcgacgctcggaatggatggaaatagtttttccattcattttcccaatccgtctctgcaataatttgctcactgaattgaacgttatgttgatcaagttcatctaaatttaataactcatctttaatttgctgtcgcaacttatcatcataagtcatttcattaaaataggctttcaatcttactcccttatctggataatcctcttttttcaaagcgtaaatttcaccgtatttatcttctggttggttaattaaatcatctgaatcttctatcacgacaccatttgatccatgattttcaagtatattggtagccaattctactgcttcatgattaataataattgaaagctctgtccagttcatactttattctcccttaaagaatctttttgctctatctttaaaattcgaaggttgttcattaatttcttcaccatttaattgggcaaattctttcattagttctttttgtctatctgttaatttagtaggcgttactactttaatatcaacatataaatctccgtatccatagccatgaacattttttatacccttttcttttaagcggaattgcttacctgtttgtgtaccagcagggattgttaacataacttcattatttaatgttggtatttttatttcatcgcctaaagctgcttgtgggaagctaacatttaatttgtaataaatatcatcaccatcacgtttaaatgtttcagatggtttaactctaaatactacgtataaatcaccagcaggtcctccattcacgcctggagagccttcaccagctaatctaatttgttgttcattgtcgacaccttcaggtactttcacttctaatttaactgttttattttcagtaccttttccgtgacatgttggacaagcttcttcaaattcttgaccacttccattacatttaggacaaacttgttcagtacgaactctacctaaaattgtgttttgttctacagctacatgaccagcgccattacagtaactacaagtctttttacttgttccaggctttgcaccatcaccatgacatgtttcgcatgttacatctttacggattgaaatttcttttgttgtaccaaataccgcttcttcaaatgttaatgtcattgtatactgaagatcatcacctttttgcggtgcatttggatctctttgtctgccgccaccgaagaaagagctaaagatatcttcaaaaccgccgccaccgaagccactaaaaccgccaaagtcagagccattgaatccttgtccaccaaaaccttgtggaccatcatgtccaaattgatcatagcttgcgcgtttattatcatcacttaaaacttcataggcttcagaaatttctttaaacttttcatctgcaccttcttctttgttaatatctggatgatattttttcgaaagctttcgatacgcttttttgatttcatcttttgaagcatccttactaatgcctaaaacttcataataatctcttttggccacagctatctctccttttcttaattaactcatatagtttaacgtaatatgtcatactatccaaataaaaagccaaagccaatgttctattgactttgacttttcagatcatgacaacattctaattgtattgtttaattattttttgtcgtcgtcttttacttctttaaattcagcatcttctacagtactatcattgttttgaccagcattagcaccttgtgcttgttgttgctgttgagccgcttgctcatatacttttgctgataattcttgaatcactttttcaagttcttcttttttagatttaatatcttctatatcttgaccttctaaagcagttttaagagcgtcttttttctcttcagcagattttttatcttcttcaccgatattttcgcctaaatcagttaaagttttttcaacttggaatactagactgtcagcttcgtttcttaagtctacttcttcacgacgtttttttatctgcttcagcgttaacttcagcatcttttaccatacggtcgatttcttcgtctgataatgaagaacttgattgaattgtaattctttgttctttatttgtacctaagtcttttgcagttacatttacaataccgtttttatcgatatcaaacgttacttcaatttgaggtttaccacgttcagctggtggaatatcagtcaattggaatctaccaagtgttttattatccgcagccattggacgttcaccttgtaatacgtgtacatctactgatggttgattatctactgctgttgaatagatttgagatttagatgtaggaatcgtagtgttacgttcaattaacgtattcatacgtccacctaaaatttcaatacctaaagatagtggtgttacgtctaataatactacgtctttaacgtcacctgtgataacgccaccttggattgcagctcccattgccactacttcgtccgggtttactcctttgttaggctctttaccgatttcttttttgacagcttcttgtactgctggaatacgagttgatccaccaactaagataacttcatcgatatctgagtttgttaagccagcgtctttcattgcttggcgtgtaggttccattgttcttctaattaatgaatctgataattcttcaaatttagaacgagttaagtttacttctaagtgtaatggaccgttttcaccagctgagataaatggtaatgagatttgagtttgtgatacacctgataagtcttttttagctttttcagcagcatctttcaaacgttgtaatgccattttatcttgagataagtctacgccattttcttttttgaattctgcaactaggtagtcaataattacttggtcaaaatcatcaccgccaagtttgttgtcaccggctgttgatagtacttcgaatacaccgtcacctaattctaggatagatacgtcaaatgtaccgccacctaagtcaaaaacaagaactttttcatctttatcagttttgtctaaaccatatgctaatgctgcagctgttggttcattaatgatacgctcaacttctaaaccagcaattttaccagcatctttagttgcttgacgttcagcatcgttaaagtatgcaggtactgtaattacagctttgtcaactttctcacctaaatagctttcagctgtattttttaagttttgtaaaatcatagctgagatttcttgtggtgtgtatgatttaccttcaatatctactttataatcagtacccatatgacgtttaatagattgaacagtgtttgggtttgtaatagcttgacgttttgctacttcaccaacttgagtttctccatttttgaaagctacaacagatggtgttgtacgtgaaccttcagggttttgaattacttttggctcatcgccttctaatactgttacacatgaatttgttgtacctaagtctataccaataattttactcataataaaattcctccatttaatcattaaattaatttaattttaaacaatgtcttttcgccaaatttaagttattggtttactttgaccattgatggtcttaatactctatctttaagcttgtatcctttttgtagttcttgagtgatttcgccagattcaaaatcagggttatcatcttgaactacagcttggtgaatatttggatcaaatgcttcaccttcagttttaataacttcaagaccattatcttttagtgcgttaatcaaactttcatgcaccatttgtacacctttttgaagagatttaaaagtctcatcatcaccttcaatttgaagtgcacgttctatattgtctattgctggtaaaatatctgttaacacacgttgtgcttgatatgttttgtttatttcattttctttttgaattctacgcttataattttcaaactcagcgtagagccttaaatatttctcttcgttttcatctgctaattgttgaagttcattaattttttgatcttttggatctatttcttcaataacattctcgtcagacgtttcttctattgcttcatcttgtaaatgacctttactttcttcagcttgttcaactgaatcatcaatattttgtttgacgtttgtttcttcaactgttgattcagtgtttttttcaactgattcgtctttatttgtcattttctgtcctccaatactttctaatccatcattaccaaattctatttaataattgaatgacattttgataatgcatagctgtaggtccaatcacagcgatttgaccttttaacgtttcatcaaaatgatattgacttgttacaattgaaatatcacttaagctgtcatcaatttcattaccaatttttacattaatatttggtgaagatatatcttgtaataattctgcaattctatttgattctatatattgtagaatgggctgaattgaagatacattactttcattcaatgcatcaataagtttaacctttccacccatataaatgctattactttgattagaaatatgattattcatcgtatttaacaatttattgataaaaatttcttcctgctctgattgaacaaaagagacaatatcatcttgtaaattctgattaaactcagttagtttgtttgtaacaaaatttgatattgtatttagtttgtcattattaaacggtatgtctgaagcaagatgtacatgctcaacatgacctgatgaaaatacgataaccattataactaaattaggattagcacgaatcaagtgtacattattgataatatcttgtttatgattaggatgaacaactaaagttgtatattgagatatatttgataattcatctgcaaaatatgtcaatgctgatgatacatcatattgattctcaactaacaattgatttaatcgtcttaatttatttgttttttgatgagatgtttgttcaagtaaacgattgacataatacctaaaacctaattgtgatggcgaacgccctgaagaactatgtgtcttctcgatatagtttaaatcttcaagctgtttcatctcatttctaattgtagcaggactaacattcaagttatgtcgctcaattagtgttttagaaccaacgggttgtccaaaatcaacataatcctcaacaattgcgtttaatatactcaattgcctatctgtaatcatgttttcacctcattagcactcacttatctcaagtgctaattataatttatcaaattggtcaaagtaagtcaatgttaaagactcgaaatttcaattttttttaatcatttattaggaaagcttcaaaaacctcattacctatgactttccctctatttgtaagtgcaatcacatcgttcttttctacaattaattccttctcttttaaattatttattgtttgaccaaagacactttcaatagattggtcaaacttctttttgaacctactactactcacaccttcatttaaacgcaacccaagaaacatttcttcttccattctctcagtcaaagaaggtttatttgatactaaaattgctttactttctttatttatagctttgatataatgattcactggattgatattcgtataacgcacaccatctacataaccacttgcacctgctccaaatccataatattcctcattaaaccagtaaaccttattatgttctgattcatggccatctaatgcaaaattagatatttcgtattgatggaaaggagattgttctatcttagacatcagcaactgatacatgtcagcacctaaatcctcattagcaagtttgagcaagccttttctatacatattataaaattgggttttaggttcaagtattaagccgtaactcgaaatatgttgaatatccatatctaaagctagatctaaactttgttcaaaatcttcaatcgtctgtttcggtaaatgatacattaaatctaaactgattgatttaatacctgcgtttttagcatttaacaccgaagtgtaaatatcttcagtattgtgcgttctacctaaaacagacaataactccggcttgaatgtttgaacgcccattgaaatcctttttactccatatttctctaatagttggactttctctttagttaactcatcaggatttgcttcaaatgtatactcgcctgtgattgtaaacgtatcacgtattgctttaagtaatctttccaactgattaatagaaagggccgttggtgtgccgccacctacatacatggtctttaagatcctatattttgctgtagacatttctgtgattagtgcatctaagtactcatctacaggttgattctgtataaaatatttattgaaatcacaatatgtacatattcttacacaaaatggaatatgtatatatgcactttgtaccgtcattttaatgccccgcttctcagactttttatccaatcggctatatcctgttggactatctgcaattattcttacttttaactttaacgtttaatcaatgattgtctaatatatcgattcattttaatatttattcttgtttagagggagtgagatagaaataataaagaaccactaatgatttattatgtagtggctcttacacattagccagatgtaatatgtccttaaaaataaaattacatgagtaaaactcatgcataagggagtgggacagaaatgatattttcgcaaaatttatttcgtcgtcccaccccaacttgcattgcctgtagaatttcttttcgaaattctctatgttggggccccaccccaacttgcacattatagtaagctgacttttcgtcagcttctgtgttggggccccattgttataagctcattttaactctgtcgatggctgccaatataacattgtaaagcccaggacgttaatttatcctaggctccctctttttagttattaaactttattcattgtaaattgttaattgattttttaaaattattcatcatccattttcaatacagccaagaaagcatcttgtggaatttcaacattaccaactgctttcatcttagctttacctgctttttgtttttcaagtaatttacgtttacggcttatgtcaccgccataacatttagctaaaacgtttttacccattgatttaatatttgtacgcgctacaattttttgtcctattgcagcctgtacaggtacttcaaattgctgtcttggaattaacgttttaagtttttcaactaatgctttaccacgttcatatgcaaaatctctatgaactatgaagcttagcgcatccactttatcaccatttaataaaatatccatcttgactaaattactttctttattttcgatgaattcataatcaaatgatgcatatcctttagtattagatttaagttgatcgaagaaatcaaatacaacttcagctaaaggtaattcataaacaatatttacacgaatatcatctaaatagtccatatttataaattgtccacgtttacgttgacataattccattactgcaccgacatagtcatttggaaccatcatagttgcacgaacatatggctcaaatattttatcaattttatcacgatctggcatttgtgctgggttatcaaccgtcacttctgaaccgtcccttaaaacacattgataaattacagatggtgcagttgcaattaattcaataccaaattctctttcaattctttcttgaattatttccatgtgtaacatacctaagaaaccagttctataaccaaaacctaatgcttgtgacgattcaggctcaaattctaatgatgcatcattcaattgtaatttttctaatgcttctcttaaatcattataatttttgttatctattgggaacagtccgcaatataccattggattcattttcttataaccttgcaatggttctgatgcaggtctactagctaatgtgatggtgtcaccaaccctagaatcatcaacatttttaatacttgcaataatataaccaacatcaccaactgttaattcatcaactggaagctgcttaggtgtattaattccaacttctgttacttcgaactctttaccagtggccatcattcgaattttatctccggctttaacaacaccgtccacaattcttatcgatgaaattacccctctatatggatcatactcagaatcaaatattaacgcttttagtggtgcttctgggtcaccatctggagctggcacaacttcaactattttctctagtatctcttcaattccaatgttagatttagcacttgctaaaacaacatcgtcttggtctaaacctatcatatcttcaatttcttgtttcacgcgttcaggttctgcagcaggtaaatcaattttgttaataacaggcaataactctaactcattatctaatgctaaataaacatttgctaatgtttgtgcttcgataccttgagccgcatctactactaaaatcgcgccctcacaagctgccaaagaacgtgacacttcatatgtaaaatcgacgtgtccaggcgtatcgattaaatggaatgtataagtatttccatctttagcttcgtactttaaacgtactgcgtttaatttgattgtaataccacgttctctttctaaatccattgaatctagtaactgatcttgcatatctcttgtttcaactgatttggtattttctaaaattctatcagccaatgtagattttccgtggtcaatatgtgctataatcgagaaattccttatattctctcttctttttaagcgttgctcattatccattttatccttctcactttcataaaataaacccgtattatctttcgcatctttgatataataacgtttttaataggtaaatgcaaacgccataatcttggatgaactttgaaattataacaatctttatttaaatacatacttgcgatatgttaatatgttaattacgtacttataattataaaacgtattgattgtgtttccaacacaatttattaaatctgcaaaattttaagctaaccccatcaaataaatgattgcacaacggttagacttttgttaaaatatttcttgttgtaatcaaataaaattttgataagatgaactcacttttaggaggtgacagaaatggcaaatatcaaatctgcaattaaacgtgtaaaaacaactgaaaaagctgaagcacgcaacatttcacaaaagagtgcaatgcgtacagcagttaaaaacgctaaaacagctgtttcaaataacgctgataataaaaatgaattagtaagcttagcagttaagttagtagacaaagctgctcaaagtaatttaatacattcaaacaaagctgaccgtattaaatcacaattaatgactgcaaataaataatctttttaaataaaagttcaagcgcatgcttgaacttttattttttataaagatagaatgaataattccagtattaactgtttatccatatatgatgatttaagtttataatcagtttccgcacaagcatctataatattcaataattcatcaagttgataatgtcttacttgtcctaacgctaattttactctgtatggatgtactcctattgttttagcaatttgctgtccactatatcctttttgactcagaatcttacattgataaaataatcggtaattacttgtaattagtgcaagtaatttaattggttcttctttcatagttattaaatcttttactaaatgaattgcttgttctttctttcttttctgaatgtattcagtcagtaaaaatacattttgctctaaacttctattaataatttggttaacatcctgcttattaattgttggtctatcgcctaaaaataaaatcaacttttctatctcttgtgagacaatattaaagttaatacctgtcaactcaataaataaatctaatgcatctcttttgatatctttgaaattctcatttaatttactttgaatccatttttttatttcttcttcagacatttgctctatttttttaagccttgcatgcttttttagagttttagttaacttttttctttcatcaagtttattttgatatatctcaaagacaatcaaattttcgccatcatatttttcaataaattctattaattgatctacattatgagccatatcttttggcgctttttcacctgtaaatatatatgcatttttaaccaaaattgcttttttatctgaaaagaaaggcaatgttaatgtttcttcaacaattggtgcaatctctgtttcgtataaattatatttcacaaagttaaagtcatctctatcacttttcaaaaattgtgatatgatttctgcactttgtttttcaaccaattcaggcacatctccataaatagctacaatattgtcgctcattcattacaccctttcattcgtttgacacatcaatagattatatcatgtttctgtatctataaaccacttgcatttccataagagcttgaatcaacttttaaattatcatctaagtcaattgtaacttgaccgttttgttgactattgtaaatgcgactgcgaatcctttgcaatcgtttaacaacttctatattaggaagatgatacatattgttcttcccagaagaaatcaaacttattttaggcttaatcatctctataaattctttagaactacttgtcttgctcccatgatgtcctacttttaaaatatcaatctccggcaagttatatttttttagtagtaaagattcattatttttactagcatcgcccattaataaaacttttttattttgatatgtaatcatagtaataatcgaatactcatttttatctcggctatttggaataaaactatcaaaaaatagaaaactactatctccaagtttaaaactactaacttgtcttacatccataagtttaatgttgtacttatggcttaatttcgataataacatcaatgtattactactatatcccttattgtatatcactatatgtttaattttaatatgactaataatatattccacttcaccaatatggtcattgtgtggatgtgttaaaattagatactctaattcatttatccctctttcatttagcgttggtaaaatatgatatttagaaattgaataactaggttgtttagtatcatcaatcactttcccacctgtatcaatcaagacattttggttcttaccgccttcatataaaatactgtctccctgccccacatttaacattgtaattttgtgatgtgaatttgttggaaacgttattaataatgtcagaataattatagtccaaaacgtaaccaatatatatttacgtttagccaataaccaaaatatgtaataaacagaaattataaatactataaatatccaatcattaaacttgggaacagaaaaatgtgattgcttgattcttgtgaataggtctagtaaccagtcatgaaaattaaaacttaggtcaaccaagtaatttagcggcgttaatcccacaataaaatgacttgtaataaagaataaaatagatagcggaaacaatataatcgaatagtacggtacaaaaatcaaattagataaaaatcccacccattgaagttgatgaaagcttggaatggcaacgataaatgaagctaattgtgcaataaacgtaattatgaataatgattgtaactttgacaattgctgtaaaaaaggaaaaagtagcataataaaaaatgaaatgatgaatgaaaattgaaatccaatatcataaacaactagtggatttaaaataaacataattataaatgcaaatgctaatagctgaataccctttattttaatttgcttagtaataaccagtacaagagttgtcattattatagctcttacagcactaggtgcataatttgtgtattgagcaaataaagctaatacaatgattgtaattcctttaatgacaaataaaggtaaatttaatcgttttaaaggttggtaaattaaaaatacaattgcagctatatgcgagccactaactgccagcaaatgatatatacctatctctttaacacgttccttaaattgctcattaacttcttttacgtcaccagtaatcaatgccataatacgatccggaaacttaatacccgaatcataaattcgattcattataaactgtttatgtttctcaattaaattagaccggttcgattctaggcagctttgtacaactatactttgtaatttaagagttacaaacttattgtcattaactttgaattgtcctttaacaatacaattacgactttcaattttctttaaatcaaaattctttttatctgttaaaaagaaaggatatatttcattttttaaactcaacctacctttatatgtgtcactaccttgacgttgaatttggattacttgagcacgctcattaaactgagaattacgttcaatataattgatataattaaatattgcttgttgtgaataatgtaaataccatgcggagaaaatgattaaaaagagagaaataggggcataaacgattttatttttacgataagtaatatacaaaagtaaaatgaaaagaaatgtagagagcactttgctagaattccaaagcactcctacaatcattgataacgcgacaaacagcaaaacattaacctttagtcagatatttagcaacatattctggtgaaaatggaatttttttaaattcaataccagattgtttgagtaatttagttgcatattcatggttatgataatcttctgcatagtagatacgctttatacctgcttgaataattgactttgtacaatttaggcatggaaaatgagtaacatagattgttgcaccttcagtagatacaccttgttttgcacattgtaataaagcattcatttctgcatgtatcgttctgatacaatgtccatcttcaattaaacatccttcatctatacaatgcacctcgccagctacagagccattataaccaccagcaataatacgattatccttaacaatcgttgcacctacagataatctttgacaagttgaacgtaatgctagcaaatgactttgtgccataaaatattcttcccatttgattctttccaagatgttcaccttccatacttaaaatttagtaacattttctaataatataagattaatcacaaaaaataaaatttgcaattaaaataatccattatgtcgtgaaataagatttcagtttatcaaaagttttacttccaaaaccttttacttttttcaaatcgtcaatttcttgaaatgcaccttgttggttgcgatattcaacaattgcattagctttagcttgcccaactccaggaacagacatcaattctgatacagatgccgtatttaaatttactttagtattatttgtgttcccatttttttcgtgcacactgtttacttcaatttgtggttcaacattcttttgtcctttatgaggtatgaaaatcattttttgatctgttaatttttcagacaaattaatttgacttacatctgcatcctccaataattgtgctttatcaagtaaatcaactactctatccttagatgtcattttataaacattaggatgtttaacagcaccttttacatcgacatatacaggacccttatttttggaattatctccatctttgacctggacatcttctactttggacaaactactattttcactagtgctttgtttcagagcagtatctttattttcaaaatttcttgaagtataatcatcttgtctccagaatataaaaccaattaataccataattaaaacaacagcacttagaatatataacttccattgagttaaaaaatctttatagcgtaataaaaattgatacaataaaaccactcctcaactttatacacgtctgagcgagtggttttacttttattttttcgcaatgaaaaacaatctttctgcatcttcattatgttcatctatattaaaatcagtaaatgtttcaacatgtttaaaaccaacttgagctaaccaagacaaatatgtcttttcatcaaatgttctctgaaaatgagactcatcaaatcttgaatatgtttcatcttcatgtcgaatgaaaaatgtcatatcatgataaacacttaaaggtaaatctccttgcacagcatcccatgctaaaaaaatgtcccctttatcatcaatataactttgattattaaacaaagtcatcattttataaacagtatgtacatcaaaaataaatacacctgaatcagtcagatgatgataaacattgatgaatgtttcaatcactgcagtttcatcttgcaaataatttagagagtcacaaaaaatagtgatgatatcaaattgttgttgcaaatcaaaagatgtcatatctccttcaagccaatttacatttgctgatttttgagctgcaacagtcaacatatcaacacttaaatccataccagtaacattacctaaagcttctaattgaactgttaaactaccagtaccgcatccaatatctaaaatatttgattcatctttgcagtgattttttacaatttcaaaccatttttcatatggttgatcttgagtcaattgatcgtacactaggctcatttctgcatattgcgacataattaatacgcaacctgactatatgattctaatggtgcatcttgatataacttttcaatattataataatttctttcgtctttatggaaaacatgtaccacaacatcagctaagtcaattaatatccaacgcgcttcattgtatccttccatacgttttacttctatattttgttcattggctacttctttcaccgctctagcaatcgcttgaacttgtcgttcattatttccgtgcgttacaacaaaataatctgtcatatcgctgatacctttcatttctaaagaaatcgtatcttcgccttttttattgtcaattgcatccacagcaattgctaataattcttgtgaattcatttaatcatcctttattctttcgtcactatagttataataatttaaacagtcaatcgtcttattatataccgtaatatctttctgtattaaaaatagtactgtgcgtttagaaatttcataaattgtcttatctaaactaccttgattgtatgccatatctcgaatatcatcaactcctgggattgttcttccaggttcgatgtaatctgcaataaaaatcagtttttcagtttttgtcatttgttgacgtccagtagtatggtatttgatagccattaatacttcctcatcattgataccatattcatgttccatgattgctgcacacacagggccatgcaatatttcactaccataactcagtagatcattacctaattcgtattgtcgaacaatttgatacattttacctaaatcatcatatttacagaaatcatgtaatacacctgctaattctactttactagtgtctccatcataaatttctgccaatttaatcgctgtttctgcaactcttaaagaatgattataacgtttctctggcagtttctcttttgcaagccgttttgctttttcaatgttcatataatccttcccccttaatatagttttcaacggatttaggaacaagaacttggatagatttcccttcactaactctttgtcgaatcattgtcgaacttatatctaccctaggtatctgaattgcaatcatagcattttcaacattttgactatttttgtctcgatttacaactacaaaagtaaccatttcttttaagtattcaatttgataccatttctctagttggttatactgatccgtcccaataacaaagtacaactcactgtctttgtgttgctccttgaatgccttgatcgtgtcataggtataactttgaccaccacgtttaatttcatcgtcacaaatatctccaaaaccaagctcgtcgataatcatctgtatcattgttaatctgtgctgaacgtctataaaatcatggtgctttttcaatggagacataaaactaggtaaaaaataaaattcatctggctgtaattcatgaaatacttcgctagctactatcatatgtgcagtatggatagggttaaactgaccgccgtaaagtactatctttttcattattatggcaattcaatttctttattatctttagattctctataaatcactatcatagatccaatcacttgcactaattcactatgagtagcttcgcttaatgtttcagctaattcttttttatcatcaaagttattttgtagtacatgtactttaatcaattctctgttttctaacgtatcatctatttgtttaatcatattttcgttgataccgccttttccaatttgaaaaatcggatcaatattgtgtgctaaacttcttaagtatcttttttgtttgccagtaagcatatgttattctccttttaattgttgtaaaactgctgttttcatagaattaatatcagcatctttattagtccaaattttaaagctttccgcaccctggtaaacaaacatatctaagccattataaatatggtttcccttgcgctctgcttcctctaaaataggtgttttatacggtatataaacaatatcactcattaaagtattgggagaaagatgctttaaattaataatactttcgttatttccagccatacccgctggtgttgtattaataacgatatcgaattcagctaaatacttttcagcatctgctaatgaaatttggtttatatttaaattccaagattcaaaacgagccatcgttctattcgcaacagttaatttgggctttacaaattttgctaattcataagcaatacctttacttgcaccacctgcgcccaaaattaaaatgtatgcattttctaaatctggataaacgctgtgcaatcctttaacataaccaataccatctgtattataccctatccacttgccatcttttatcaaaacagtgttaactgcacctgcattaatcgcttgttcatcaacataatctaaatacggtatgatacgttctttatgaggaattgtgatattaaagccttctaattcttttttcgaaataatttctttaattaaatgaaaatcttcaattggaatatttaaagcttcataagtatcatctaatcctaaagaattaaaatttgctctatgcataacgggcgacaaggaatgtgaaataggatttcctataactgcaaatttcatttttttaatcaccttataaaatagaatttcttaatacaacatcaacatttttaggaacacgaacgattactttagcccctggtcctatagttataaagcctagaccagagatcataacatcgcgtttctctttgcctgtttcaagtctaacagcctttacctcattaagatcaaaattttgtggatttccaggtggcgttaataaatcgccaagttgattacgccataaatcattagccttctccgttttagtacgatgtatattcaagtcattagaaaagaaacaaactaacggacgtttaccacctgatacataatctatgcgcgctagaccgccgaagaataatgtctgcgcctcatttaattgatatacgcgttgttttatttctttcttaggcataataattttcaattctttttcactaactaaatgcgtcatttggtgatcttgaataatacctggtgtatcatacataaatgatgtttcatctaaaggaatatctatcatatctaaagttgttccagggaatcttgaagttgttactacatctttttcaccaacactagcttcaatcagtttattaatcaatgtagatttcccaacattcgttgtccctacaatatacacatcttcattttctcgaatattcgcaattgatgataataagtcgtctatgccccagcctttttcagctgaaattaatacgacatcgtcagcttccaaaccatattttcttgctgttcgttttaaccattctttaactcgacgtttattaatttgtttcggcaataaatccaatttatttgctgctaaaatgatttttttgtttccgacaatacgtttaactgcattaataaatgatccttcaaagtcaaatacatccacgacattgacgacaataccctttttatccgcaagtcctgataataattttaaaaagtcttcactttctaatcctacatcttgaacttcgttataatttttcaagcggaaacaacgtctgcaaatcacgtcatcacgaaacatattatgctctggtacaaaaccaggtttatttttatcttcagattgaagtggcgcaccacaaccgatacattttaaaatgtcagacaatcaattttcctcccatgtgatataaccttttttactgaaatgacgtaataatcgtctttcaattaatctattaaacttagtaataaagccatcagttcgtttaactggaacaaccataattgtatatagacctcgacgattaccaccaaatacatcagtaagcatttggtcacctataacaacagtttgatctggtctgatattcatcttagttattgctttatcaaacgctttccccattggctttctcgctttaaaaataaaatcgatgtctaaatgctgactaaaactagcaacacgagactcattattattagacacgattgtaatagtgattcctttttcattagcttccttaaaccatgctttaacacgttctgtaggttctttaacatcccaacctactagcgtattatctaaatctgtaataatacctttaacgcctttgtccactaacttgtctaaatcaatttgaaatattgattgaacatatgaattcggcataaaaaacttgcgaactaaacccatttaactcacctttacctttttataattgagacactaatgcttcaacagtttgacttgatgatacagctgctttttctaaaaatgcttcgaagctcatttccgcttctccatttgctaagtctgaaactgcacgaactacaacaaatggtacattaaattgataacatgtttgtgcaattgcagttgcttccatttcaaccgccatcgcatttggaaatgcttttttaattttttggcgttgttcaacactaccgataaagctatcaccacttacaattaagcctactttagctgttaattgttgttgttgtacaacttgagatactttttctattaaaggtttacttgattgaaatgctaccggcatctgtggtatttgtccatattcataaccaaatgctgttgcgtctgcatcatgatattttacatcatcacttataagaacgtcacctacatttaaactttcatctaaagctccagcagaacctgtattaataatgacgtccggtttaaacttattaattaataatgtcgtagaaattgcagcattaacttttccaatgccactttgggtaatcactacttctctatcttttaaaatgccagtataaaatttaacatgtgcaactgaaatttcgcttaattgtgttaatttattttttaatattgttacttcttcttccatggcaccaattataccaatcatcttttgattcacctcttttaaaaaatcctagcatttgttattttatcacattttaatcactacaacgacaagtatcatgattttcattactgtataaaacttttgctttatttttataaaaagctctttcaataacttggtatcataaataattatttttgaactcataacagtgaattcgatgcttctaatttgtctatttttcaaaaactaatcatatcaattacatcaaccaatcgtgtcaagaaactttattaaataacaggaaaatgatatgtttaaaataataatgatgaaataagaggattttacaatggctgaaaataatcaaaatagtctcgtaacaaagatagctacatacggcagttttattgcaattgcgtcgtttgtcattttatttataagtatatttttaaagttttcatttaatatcgagtttacagcaacaattatgaacatatgtcgctacactctaattctaggatttatacttatgtccttacctgatgttgttgataaaaacatcaagaaaattatattcgatgcatttattatcatcgtctttatcttctttttactatagtagttttattttgtaattacacagttaatcatatttgtttcgtatcgaattcctttgtgcattaaagataattctaatagaaaacagcagtaagacttttctaagtgttagcatccttactgctgtttttatttgtaacaacataatgacaggtactttatatttcactgtcaaagattattaatgattaacttaattaaattatgatttgaataaatagatatctaaatgcaatttgtcactattgatagttttattatcagcatacatttttaatacctcacgaccatactcaccatttaaattataaaaatcatattctacattttgttcatcatcattataatatttaacataccctttaacaatgtcgccaccttgttcgtacaacttatacttctcattcaaataatttcttaattgaacctctaattcttgaatagtaacaattttctttttcgtttttactgcagttagttctatttctgtttgatgtccgtcaatccataaattacaaggtatattcttataatcatcgtatttattattgtcacttaaagtaacaccaccataactacattgcgttttattggttgctcccccatgacatccgtatccataatttccagcaaatatatcgatatccttatttataaatttctttgaaagtgcctcattttcaaattcaactttaaaatcctttttccaatcatcatttacgaacatgtcatgaaataacaaatcatgcttcaacagtctatcgtttgtgtttttattttcaagctgagttggattgatgaatgacatcttagcattacttagacgctttgaatcaaacttacttttatgatgtaagtctgaatattcgattgcactcgctgaatttgtaaaaattccttctaacaataatattaaaataaatcctgttaaatatttaacttcaaactcccccaaaacaattattaatttacatttgagagcgagacataaatgataaagaaccgcttatggtttattatgtagtggttcttgagcctacaattttgattatgtatcacgctcataatacttttcaatttgaaatactctgttcgcaattattagttgagttatatcaaccaatacagtgtatacctaaaaattccaaaccgtttaacagtatataagaaaaaatgataatcatttcttttatttttattaaatttcataatgattcatataatattctcattaaaacatcacaatactgatacacaacaaaaagagcagtacatttgtcatgcaccactctcaacaaatatattttttcaatgaagcaattacgcgatcttacaaatactataagtatagctgatcacatattatatttattttataatcgaatttagaaattcatcacttatctcataaattgttggtctacttttaattttaactaagtagttatcatattttttaattgtattattaatttttactcttcctactcccaatatgttttctaaatcaattaatgttaatctatttcttttatttccaaacaatttatccattgaaaggagatacaaaaattcataatctatctgtttataatgactagttaaataaagcgttaatttttcagtcgcatccatttttggtattaactcatcaagtattctttcttgtcctgctatcaatagttcaagcattgtgtcaataaattccgtcaaatcaccacaattcaaatgatttgaagcagtcataaacgccttgtaatatttcgatttatttctatttataacatatgaaaatgtcaaagcagtataattatcataataatcactcaagagcttggcaattataaatcttccaactctaccattgccatcataaaaaggatgtatatattcaaacagataatgactagccatgattttgaacggctgaggcgcatcaaaatattttaaaaatgttagcatttcacctataaattcaacaattttggtttcaggttgtaacccaacatgtatatatttattcgttgacccatcatgcacaccgacaaaatttttacgaaatagctctccatctaacttatcttgttcgttaatttcatttgaaactaatttatcataaatcgctctaatgtctcttacattatcaactttaatttttttattaagttctatctctttatattgatccacgaggcctctgaacttaagaaattctgatgcttggttatttaacgcatgtgcaatctcttgtttagtactaaatacattttcaatttcattagtactttgtaattcatcgattaataaatcattaaaatattgttctctagctgcatatggtaaagaattaagtgctctatcaatttttctactattaattgatattaattcttgtttttttgatagatttttagtcaccataaagaatagaggatattccaaatcattaactttttttccattttccataggtatgatattaatattagtattgaaagaagctaaagaattaaatcttttaatatactcttccttcattttactttcattgtgttcatgaaaaatactttttaaagttctgtaacccatttgcagcctcctctactcatttaaaatgtattttttgtccaataaatcaattttcattagattagctaaatattatcactttttttctttaaaaactatataaataactattttctcaatcaatagaaaaagatttttcatcacaacaaaaagagcagtacatttgtcatgcaccactctcccttaaaatatatctaattatgctttataaatgaatcaccggaaatcaaaatatatcttgcctaatactaacaacatttacagtgatgctattagtcgaaatgtcttttaaaataactgaagtacttctttgaatgagaatatacctgtcaatattgtaacaagtactgcaacgataccaaagatgaacatccaatttgggtgtttataatcaccaacaattgatttctttttacttgcaatcaaaattgcacctaacgtaataggtaaaatccatccatttatcgcgcctgctataattaaaaggctgattggttttccaataaataagaaaatcattgttgaaataacgataaacacaatcacaattaaattacttctttcgttaagtgatttatgaagtgtttttaaaaatgttgcgcttgtgtatgctgagccaattactgatgacatagctgcagcaaataacacaataccaaaaatattctttccaattggtccaattgcgtgttcaaaaactgacgctggtggattttcagaacttagtgtcacacctgttacaacaactcctaataccgctaggaatagtaacgttctcataatacctgtagttaaaataccagcaattgctgattgatttacaaatggtaaatattgcttacctttaatgccagagtctaatatacgatgtgcacctgcaaaggtaatataaccacctacagttccaccaactaacgtaatgatgggcaagactaatttcattggatgttctggcgcaaatgtatgcacaaaagcatcaccataaggtggattagaaacaaacatcacatatgccacaactaaaatcatcacaataccaagaatcattgaaacaacgtccataattttttggccacttttacttacaaagattaatattgcaaagattgcagtaatagctgcgccccattttacatctaatccaaaaattgcatttaaacctaaaccggcaccagcaatattaccaatattaaaagctagaccaccaaatgcaatcaatattgagataacagtaccaagcccaggaacaactttatttgatatttcttgacctcttaaaccagttacaactaatatgcgccatatattaatttgtgcaccaatgtcaatgatgatagacagtaatatggcaaatgcgaaacttgcaaaaaattgtgatgtaaatactgctgtttgcgttaaaaatgctggcccaattgcagaagttgccatcaaaaatacagaacctaataataaccttttatgattttttgtgaattcaaagtcactttcttttttaagctttaaatttctccccatttttttagccccctataaggattgaatatcaatgccttctttcattaaaatttctctaattttcgaaacaaataataatgcatgttctccatcaccatgcacacaaattgtatctgcttgtaacgttacttccttattgttttttgaaataactttattttccttcaccatctttaaaacctgcttaagtgcttcgtcagtatcagtaatcacagcatcactttcttttctactaacgagctgcccatcatcttcgtatcgtctatcagcaaacacttcagaagctgtaattaatccgacattctttgcttctgaaattagatatgaatttgctaatcctactaacactagtgatggatcaaagtcataaacagcttgtgctataacgtttgctatttctctgtcttttgcacccatctgatacaatgcaccatgcggtttaacatgattaattttaacttgatgaatgcgacaaaacccttgtaatgcacctaattgataaatcatcaaattataaatctcgtcgttagagatatctatatttcgtctgccaaagcctttcaaatcaggtaaaccaggatgtgcacctactgcaacattatgtgctttggcaagttttaccgtttcattcattacattttcatcaccagcgtgaaaaccacaagcaacattcgcacttgtaattaacggaataatttgatgatcaccaccaaaggaataatttccaaatgcttcgcctaaatcacaattcaaatcaactcgcattataattccacccctttaacaatttgatgtttttctaaaaatttaatatcaacatcttttgcatctccatcacgatatagtggataatttaaaactgcatataaaaaatcggcagttgtagaaaatccatctatcaccatttcatctaaggtgactttcaacttatcaattgctgaagctctatcatgagattttacaattactttagctactaaagaatcataatatggtgaaacttgataaccgtgatatagtaaagaatcgactcgcacattaaagccttgaggtaaatgtaacgctgtcactttacctggtgttggttgaaatttcttttcaggattttcggcatttattctcgcttctatcacatgaccattaaattgaatatcgctttgtgaaaaaggtaaatgattatgttccaataaatacagttgtgctgcaaccaaatcacgttctgctcgcatctctgtaacagtatgttcaacttgtattcgagcattcatttcaataaagtaatgtgcggtatcagttactaaaaattcaatcgtacctgcacttctataatttgctgcacgtgcaactttaacagcatcgttacatatttgttgtcgtctttcttcagttaatgctgcacaaggagattcttcgattaatttttgatttttacgttgtacagaacaatcacgttcccctaaatgtacataattatcctgcccatctcccataacttgaacttcaacatgttttgcaacaggtataaaagcctcaacataaacacgatcatcatcaaagtatttttttccttcacttttagcttctttaaatgccttttctaaatcttcagctttctttacaatacgtatacctttaccaccaccgccactggcagctttgataacaactggataaccgatgtctttggcaagattctcaatttcagacacatgattcacagcaccatttgatcctggaatcacaggaacacctgcatgatgaactgtttgtcttgctgttattttatcccccatcatttccatcgtttttttagtaggccctataaacgctatgccttgttcctcaacggtttgagcaaattttgttgattctgataaaaagccatatcctgggtgaattgcattagcaccagtgatttgtgcagcagatatgatgcggtcaatatttaaataactatctaaagcattagcttccccaatacatatagcttgatctgctaaatgtacatgcaagctttgctcgtccccttttgcataaactgctacagtttcaatcccatattctctgcaagctcttataatccttacagcaatttcacctctgttcgcaattaaacaacgaagcatttacttaccccctttacttaatacgtaccaaaacttggtcgtattcaacatttgtgccatgatcagctactatttcagtaatttctccagcaacatctgttgttacctcgtttaatactttcatcgcttcaacatatcctataatatctcccttgttaactttgtcaccgacattcacaattggttcagttaattctttactatcttgtaaaaagaatgtacctatcattggtgatttaatgtcatgataatcatttgtcgaaacatcggagttatcattcgcttttgaagctgtcaaatcattattgttcatactttgatttgattgattactgtgtgcagccaaatgattcgagtcagtgaagtcaatttctatttcatcttcaaaatttttatatttaaatttcttaacatcattttccttcactaatttgattatttgttcgattttttcaatattcattttacaaatccccttttaaaattgttgctaattttttcgaagtatgtcgcaagctagatgtatcaaaaattggagtcttttgatgactcttaagaatttcattaaacagagacatttgttcccgattcttatctacagcttcttggaatgatatccatttaaattgaattgtatcttgtggtttcatctgtgctaactttggcagatcaaatttgcatacagttgcaattttggtataaccacctatcgtttgtttatcattaagcagaataataggttgaccatcatttggtacctgaacactaccaagagcaaccggttcagaaatgatatctgcttgattaattggtgcaacgctgtcaccttccaaacgatagcccatacggtctgattgttcagtaattaaatatggatgatttacaattttcgctctagcctcttcagaaaatgcctcgaattgaggtccttgaagaatgtgtataatattattttctggcaataaatcgtcctgtaaatgaatcgtctttccaatgttttctttaaagtcattatttattttcactgttattacatcatcagctaataactttctacctttgaatcctcctatactgcttcgggtatgtgttgcataactttcagcaatagaaggtacgttgatagaatgaccaaaagtaagataaccgcgtgcacctttggttatagcacctatttttaaaatgtcacctttctcagctaatatgacagaattcattgatatagttttattatttagcgaagcattaatactaccaccggttataacaaatgtattttgcgtattaaattgaatggtaggaccaatcaaagtatattcaatcgctggaccatcattgttaattaatgactgcgcaaccttaaaactaaattgatccatggcacctgcgcctgaaaatccaatatgttcataacctattcttcctagatcttgtaccgttgaaaagagacctggttgtaaaatcttaattgacattttcaatcaccacccagtcatcaacattaaagttgccatctgatatatctctttcgatttgtataaatttctgttcatctattgcataaaattgtatccattctcctgcttcgtacattgacattggttcacgctcgctgctaaatacttttaacggtgtgcgtccaataatttgccatccgccaggagaatctgatggatatagtcctgtttgattattcgcaatacctacagaacctgcatgaatttttaaccttggctgattacgtctaggtgtatgtagttgttcatcaagtccgcctaagtatggaaatcctggcataaatcctagcatatatattaaataaggtttacttgtatgtttttcaataacttgctcaacagttattcgattatgctttgctacttcttcaatatctggtccatatgtaccaccatattgaacaggtattttaataatacgattggtttgattcacagcatgaacatttttttcattaaatttgttaagttctaaattttcaattaatttagaagatgttatagcttgttcatcaaaatatattagaactgctcgatacgaagggacaatatcttgaatttctaatatttctttttctcgtatccaccgtaccattgctgtgacattacgatatgtctcttcggatattttattttcaaaataaatcataattgtctgctcgttaataaatcttacatccactttaaatccccctttgtattgcaataaaccagtattgaataccttttcattgtatcattgagaagcacaagttgtttaataagtaattcaaatcgcatataataacaaatgataatcaatttgttttctcggaaatattttgcttttttaaaatggagtagttaatattgtaactcttacactaatttaggttctgctatcattcggtctgatggaaaatttttacttttcatctgtccgattttttgattttgaatataaaaaagcacgaccgaagtatcattaacacacttcaatcgcgcaattaaataatctatttgatcatttattggatattaacaatttttacgttcatttcgccaccattaggtagtggaacacgaacttcatcatctaaacctttaccaattaacgctttagccattggtgattcatttgaaatcttaccattaaatgcatctgattcagctgaaccaacgatttgataactttcctcttcatcacctggtaattctacaaacgttactgttttaccaattttaacaacgttgttatctccagtatcttcaatgattaatgcatttcttaacatatgctcaattctttgaatatcttgttcgatgaatccttgttcatcttttgctgcatcatactcagagttctctgataagtcaccaaatgaacgtgcaactttaattttctctacaacttcaggacgcttaactgtttttaattcttcaagttcacgctctaatttttcaaaaccttcttgagtcattggatattgcttttgattttccatattgtcatcttcctttactgaattatactattgcttgctaactaaagactgaatttttgttgtcataatatctattgcaactttattgctcccaccttcaggaataattatatcagcatatttcttagtcggttcaataaattggtcatgcataggtctaacaacacttaaatattgattgataacagagtccattgaacgcccacgctctttagtatctcgtgttaaacggcgtaatattctcaagtctgcatctgtatcaacatatattttaacatccatcatatcacgtaataccttattttctaaagcgaaaatgccttctacgataataacatctttaggtttaaaatcaatggtaatgtcacttcttgtatgactagcataatcatatgtcggtacttctactgctttaccatttttcaagtctttaagattttcaattaataaatcattatcgaatgcaaatggatggtcataattggtttctaggcgctcgtcgaaagtcaagtgcttttgatctttataatagtaatcttgagcaagtaaagcgacactatgaccttctaagtttttcataatttcgttagttacagttgtttttcctgagccagatccaccagctatgccaatgattgtagtagctttcattagccaatttcctttctcatcatgttgtttggatatatcgggcgatccactttaatttgaacgatttgtaatggatggcgcgccgcgtctaagctgttaccttcttcatcataaattgcttctactacttgtgtaaatgtttcaatttctggaccaaagaattctatttcttgacctggtttaaagttatttcgttgttgaatagtcgcaatttttgtatcttcattatagtctaataccaaaccacaaaaatcaaatggtgattttttagattgttgttgaccaaacatctgttcttcataaccaggtgttccctcaaagaatgctggtgcagtgtctctatttgcacatttatctaactctattaaccattccggattaatcttaaagttgtcaggatctgccgcatacgcatcaatgactttacgatatactgagacaactgttgcaatataatgaattgacttcatacgtccttcaatttttaatgagtccacaccaatatccatcatttgaggaattgattcgattaattttaaatctttaggactcatcgcaaacggtgtaacttcaccttgattataaaaaacatcaagttcaccattatcatcaacttctaataattcataatcccaacggcaactttgacagcaaccgcctctgttggaatcccttgcagtcatatgattacttaatgtacatctacctgaataggcgatacacatagcaccatgaataaatgcttcgatttcaatatctactttttccttcatttcacgcatttccatcgcgccggtctcacgtgctaatacaacacgatccaatccttcttctttccaatattctacagctttgtaattagaaagtgattgttgagtagataaatgaatttcaagttttggcgcaacttctttacatgtttcgataattaaaggatctgcaacaatgatacctgtcgcaccagtcttttccaaattacgcaaatatgattctagaccttcaatattctcatcatgtgcaataatatttgtcgtaacataaattttggcaccgtaacggttcgcaaattcaacaccttcagctatttcttccatcgtgaaattatcagcatttgaacgtaatccatattcttgaccacctaaaaatacggcatcagcgccataatgtactgctatttttaacttttctaagtttccagcaggtgctaataattctggtttcttcataactgttttaggagttgatttaatctcttctattgtcttcatgattaacctccttaatatactgtttgtttatataagaaaccttcgtcaaatggtcgatgatcaggttgaatttcttcaattggatccatcaacataaatttctcatcttcatagatttcaggatcttcattgtacaaatctatcgcttgacgatactgttccgttaccacattaatatattcttccgtttgtagaataccatcgattttaaatgaatctatacccgcctcaaaaaatggtgctaattcttcaattaaacaaatgtcgtttggtgacataatgtgcgtaccattgtaatcttcgtaaactgggtaattattttgtctttcttcatcataaagtaataaagattgttcatcattgcgacgttcaattttcatttggcgatcttggaacgtataataattgcctagtagcatacgctttgattgaaacatacaagtcattccttgaacttgcacctcaatttccacatttgaattttcttttatattaataatttcatccaaattcagctcacgtgctaagacagctcttgatgcgcctcttttaccccagtaattacattgaaaatgattagttactaacgtctctgcattccaatgaagtggtattggattttcttgcgccttcacatacattactactgctggatccccgaaaataattctgtcaactcgtatttcatgtaaaaaattaatataatcttctacagcatctaaatgataattatgaaataatccattcactgccgcatatacttttttatcgtttttgtgagctaatgcgacagcctctgtcatttgttgtctattgaattcccctggaagtcttaaaccaaacttttgctcgccaattacaaaagcatctgcacctaaatcaataagtgtttccatatggcttaatgacttgggtgtgacaagtaattctgtcatagtcattctcctttaattgaaatcgctaatccatcgtctatatttaaaaaattcgttgtatatcctggttgctttattaaccactcattataatcttgaacctttttaaccatttgtcttacatttctcgatctaacaatcccaatatccgatacaaaaccgtgatataaaacattatctgtaattacgagaccttggtgctttaaaagtggtgtatatatttcaaaaaatttctttgattgcgcttttgctgcatcaataaatatcatatcataaactttgtcatttacattttcaaattgctctaaagcattaccttcaataattcgaacctggttttcaaaatgataagtagctaaattttgtttagcatattgaatcatcgtttcattacgctctatcgttgtgacatgaatgtcatcagatatagaagcgaattgcatagaactatagccgattgctgtaccaatttctaaaatatttttaacattattcatacgaattaattgcttaattaaatctaatgttaaacgatctacaattggcacttcatttacctcggcaaattcacgcaaaacttcgattgaactattttgatgttgatgtaaatctattaaatattttttatttaggtcatccatgttttaaacttcctttatgtaaaataagtcaatatgattatgacaataaaataaatcagccttcacaattgattataattttgccaaccaattaaatgactgatttcgtgttagacgcaaagctattttatttatagaagtgaatcattcatataaaatttaactttagatattttaccatattttcaataaaattataagcgttaattatttatacattgcttgacttaaaaaatactcttgcctccccatctttaaggttagcaagagtaaaatctttttaattattcttccatttcagtatttacaacttcttcaatcatgtcccattcttcatcagtttcgattggtactaacttaccaccgtcacctgactcatctggttcattgatcattggtacaagctcaatcatatcgtcttcatctgattgagcaccttcttcagctaagataacatactcttttttgaattcaggatgataaaattctaaaacttttcggtataaaacttcatttccctcttcatcgaataaagttaataattcttcttcgttattaatttctagttgtgaatcatgattatgttcagtcatagtaaaatctccttttaatgtagtgaatctaaatagccttgtaaaataaataccgctgccattttatcaatcacttgttttcttttttgtcttgaaacatctgcttctaataatgatcgttcagcagccattgtgcttaatctttcatcccacatcacaatctcaatagaaggataagcttctaataatttttctttatatgttaacgaagcttcgcctcgaaatcctattgaattattcatgtttttaggtagtcctattacgactgtacccacattatgttttttaataatgtctactaattggtcaatacctaattcattattttcttcattgattcggagtgtgtctaatccttgtgccgtccaacccattatatcactaattgcaattcctaccgttctactaccgacatcgagtcctaaaattttatgttgtaacataaattatttattttgctcttttaaatagtaagaaacaagctcttccataataacatctctatcaatatgacgaatttgatttcttgcttcattttggcgtggaatatacgcagggtcacctgataataaataacctacaatttggtttacggcattatatcctcgttcatctaatgttcgataaacattatttaaaacatctcttacatcttgcgttggaagttcttcatagtcgaatttcattgttttatcaaagttttccatttgcgacactcctttaattacaaatataactcactatcatcatacaatattatggctttaaattatagatttttaatgtaatctttaataaagcttaatgattttgagatattttcaggttgtgtaccgccaccttgagccatatctggacgaccgccacctttaccaccaacgattggtgccatttgtttgataagatcaccggctttaacgttatttgttaaagatttagggacagttgcaaccatcgatactttatcatcaacattacttgcaagaatgataattgtatcttgtagtttagatttaaaatcgtccattgtcgagcgaattgctttcgcatttggtacatccacttcagtaaccaatactttatagccattgatttcttcaacttgatcttcaatattacccattttaagtgatgtgatttctttgtcacgttgctctaattgttttaataatgctttttcttcatcttgtaattgtgttaacttatcgactacttgatcatcagatttcactttcagctgtgatttcatcgtattaaatttctcttgaatatcttctaaatataagaaagctgctttacctgttaatgcttcaatacgacgcacaccagctcctgtacctgactcacttactattttgaataagccaatttcagaagtattgcggacatgaataccaccacataattcaattgaaaatggtgccatatttactacacgcacaacatcaccatatttttcaccgaataatgccattgcgcccatttctttagctgaagcaatatccatttcttgaatgttaacgtcaatacctttccaaatttcttcatttactaagcgttcaacttgatcaatttcatcattagtcattggaccaaaatgagagaaatcaaaacgtaaacgatctgcttctactagtgaaccagcttggttaacatgatcacccagtactgatttcaacgctgcatgtaataaatgtgttgcactatggttcttttgaatgtcacgtcgatcattttggttcacttcagcagacactgtagcgccaacatttacttggccaaattgtactactcctttatgcaagttttgaccatttggtgctttggttacttcactaacagcaatttcaaaattgtcattataaacaatacctgtatccgcaacttgtccaccactgattgcataaaatggtgtttccgttaacatgaagtatactgtttcacccgcttcaacttgtgaaacttcttcaccattgtatatcaagtgtgttagtgttgtttgagctgtcgcagtatcataaccaacaaaagtacttgcagatgtaatatttttcaatacttcactttgaacttgcattgattgagaattttgacgtgcttgacgtgcacgatcacgttgttgttgcatttctgactcgaatgttgtcatatcaactttcaatcctgcttgcactgctatttcttcagttaattcaattgggaacccatacgtatcatacaatttaaatgcatctttcccattaatttcatttgttgtcgctttagcttttttaattaattcatttaaaatcgctaaaccatcttctaatgtttcatggaatcgttcttcttcagactttataacacgcttaatgaaatctgctttttccttaacatttggataatatggttccataatgtctgcaacaatatcaacaagtttgtacataaatggctcattgattcctaacgtttgactaaaacgaacggcacgacgtaacaatcgacgtaatacataccctctaccttcattggcaggtaatgcaccatcagaaattgcaaatgcaatcgtacgaatgtggtcagcaattactttaaatgccacatcttgttcgttgtttactaaatattgtttacctgatactttttcgatttcattcattataggcataaataaatctgtttcatagttagtacgtacattttgagaaactgaggccatacgctcaagccccatgccagtatcaatatttttattaggtaatggtgtgtaactatgatctttattatgattgaattcactaaatactaagttccatacttcaagatagcgttcattttctccacctggatacatttcttctgccggatcgtcttgtccatatgcttctccgcgatcatagaaaatctcagtgttcggtcctgaaggcccttcaccaatatcccagaagttaccttcaatgcgaataatacgactttcttcaagcccaatatctttatgccaaatgttgtatgcttccatatcttccggatgaatcgtaacgtacaatttatctggctccatacccatccatttatcactcgttaaaaattcccaagcaaattcaatcgcttcttgtttaaaataatcaccaattgagaagttacctaacatttcaaagaatgtatggtgacgcgctgtgaaaccaacattttcaatatcatttgtacgaatagctttttgagagtttacaattcttggctttttaggtgtttcacgtccatcaaaatatttctttaatgttgctacacctgaattaatccataataatgtatcatcatcaattggcactaatggtgcagaaggttcaaccatatgtcctttttcaacaaagaaatctagatatttttgtctaatttcactcgcttttaactttttcatcatttacacatcctatttactgtttttaaattaccattccataaaaattgatgacacagatagtcgatttgcaaaactagtataaatcaatatcattttttattattaaaaaataaaaaacgcccatcctcaaaagggacgaacgttatcgcggtaccaccctagttataaatgcaattcaacacatttatcactttaattcgactatacagttgtgcataaagtagcgttcactaatgtttgttgtacttttcaccaaccagtacatctctgataaacaaatcattaactactcatctttatacgaatttaattctattttagttacatttacgcttgttgtcaacgttctataaagtcatacggcgtgatttctcccatattaatcattgggtcaattttaaacattgtagcttccgttaatacatttgtatctgtttttgttgaatcagacataacttcttcactatcattcgatgacattggcgcttctacttgatcatctattgtcgtttgtgaagctcctgtatcattagttgctgtgttttccagcatttcttcatcttctgaattaaaataatttttcaacaatgtacataattgtgttaaacgcgcttgaccatttgttttcaatccaatatcaaatgcttccggatcaccaagtaaaactaaactcgttttcgctctagttaaaccagtatataatatcggtctttgtaacattctaaaatactgtttaacaataggcatgataacaataggaaattctgaaccttgtgatttatggattgatgtacaataagcatgtgttaattccatcatatcttgtttcgtaaatgtaatttcattaccttcaaaatccacaacaagtacatctttattaagggcattttctttcgcccaaaaaataccaacaataactcctatgtcaccattgaatatgttatcatttggcctattaacaagttgtaatactttgtcaccttttctaaagactacatcaccaaactcaatttctcgtgtgtctttctttttagggtttaaaatatcttgtaaaacttgatttaaacgtttaataccggcatttcctttatacattggtgcaagcacttgaatatcagccatagtataccctttattaacagcactagtaactaccttctcaacaactgttggtatttggtttgcctgacagttaataaaacttctatcatgaaaacgctgtgtaatatcaattttctgacccaacttcattcgatgtgctaattctataatgcttgaaccatcttgttgacgatatacttcagtcagatttactcgtggtatagctttcgattcaattaaatctttaaatacttgaccaggacctacagaaggcaattggtcctcatcacctacaaatatcaattgtgcatctaaaggaactgcacttaaaaattggtggaacaaccaagtatctaccatagacatctcatcaatgattatgagtcgtgcgtttatttcattttctaatatatcctctggctttgtgtcttgattccaacctattaaacgatgaatcgtcattgcttctaatccagttgactcttgtagtctcttagacgctcttcctgttggcgctgctaatacaactggataatcatcattgacataatcatcataatctaatgataagccatgaatctcagcatataattcaacaatacctttaattactgtcgtttttcctgttcccggtccaccggttaatagcatcaccttagaattgatagccgtttgcaaagcttctttttgtgaagctgcatagttcacttgattcgcatcttctatttcaccaatatgcatttgtaaatctgactgttcaatttctgtaagtttatttgtatgcgtctttattctgaataagttttgaacacttttgatttcagaataatacaaacttggaattgcaacttgttcattgtcaataattagtcgtttttcctcatttaagtattgcaacatttcgtctaatttttcaggttcgatgacctcttcatcttgataatttaatacatcaaccgttaaatctataacaacattgataggcaaatatgtatgtccctgtttaatacattcttcttctaacgtatagagcaacgcagcttttaatcgttcattatcgttataagcgataccaatatttctagcaagttgatctgctttattaaaaccaatacctttaatatcataaatcaattgatatggatttcgatctaaaatagtcagtgtatcgccgagataaaactgataaattgccattgaaagtttaggaccaaaccctaaatcatgtaaacgaatcattattttttcagattcttgatttgctgaaatttgttctgcaatttgtttctgtttctttttagataatcccgaaactttttctagcactgaatggtcatctaatatatcatttatcgcattgtcacctaatgtattaacaatattttgagctgtctttttacctacacctttaaacaaatcactagataaataacttataattgcttctttcgtttgtggcatttctttttcaaaagtctctgcttttaattgtttaccataacgtggatgatcaacaacttgccctttaaatgtgtaggcatcgccttcaacaatattcggaagaaaccctacaacagttggcattgtatcaaagtcttcatttgtttcaatagtatctactttaagcactgtataaaaattatcactgttttgaaacaatatcgcttcaacagtacctttgatcattgaataatcaaatagtgtagggtctgacatgttactcctcctctttcattttagtgaatgttttcagcgcatgctgacttaataagtgtttagggtcgatagtcacagcttctttaaaatgagttattgcttcatcaatatcttcatttttcataaataacgctaagcccaaattgtatcttgcatcaacatgatttttatcaatcgttaatacatgtttaagttgagttatggcttcattaaacatttctaattgacataatacaagaccatattgaaattgaacttctgcatctttgtctttatctagttccgcagcagtcattaaatacggcaatgccagcttaaatgattctaactgattaaacgccataccgatcatataattacaatcaacttgttcaatctctgtttgtaatgcttgttgatataatttaatagcttcttgataacgttgctgattataatatacatttgctagattaaaaaatacgacgccattcttcggatctattgttaaagctttttggaaaaaacgctctgccttttcaatctcattcgcatcagcaagtacgataccagcattaatataattttcaataattgtaggattttcttcgatatttccgaacaatgcttgtaacgcttcttctatttttccattttgtatgtattgataaattgtttgttgatctatcatttacgaacctcatttctcatcaattataacatcttgataaattgtatgtctcgaatcacttaacaacgaataaaatataatctaatatcatcttcattcatgaaaaagcgggaatggaatagaaatgcttaagaaccattaacggtttattatgtaatggttcttccacattagccaccactattatgtacttaaaaataagaatacataattagattcatgcatagggagtgggacagaaatgatattttaacaaaattaaattcgttatccccaactggcattgcctgtagaatttctttacgaaattctctatgttgtggtcccgccaatataacattgtagagcctaggacattgtgatgtcccagactctatcctcatgaattattctcatcaaaaactgtctttcgtcattttcaacgttgaaacttcaaataagtaatttattgttgccattgtttatacaacataatttaattgaccttcatttttgaacacatcgtcaattgttgcaccaccaagacacacatcaccttgataaaaaacaactgcttgtccaggtgtgattgctcttactggctcagcaaaagtaacacgtagtgcatggtcgttttcacgtttcacaaaaactttcgtatctttttggcgatatctaaatttagctgtacattcaaaaccttgatctaagtcattatcttctggatttacaaatgaatagtctgaagcaattaagtaatcactgtataatgcatcgtgatggaatccttgttctacatataaaacattatcttttaggtttttaccgacaacaaaccaaggatcgccatctccacctatacctaatccatgtctttgtcctattgtgtaatacatcaaaccactatgtttacccattttcttaccatcaagtgttatcatatcacccggttgtgcaggtaaatattgtgataaaaatgttttaaagtttttttcgccgataaaacaaatgcctgtagaatcttttttcttagcagtaacaagtccttgttcttcagcaattcgacgcacttcactcttttcgatgtcgccaattgggaacatcacttttgaaagttgttgttgagataattgattcaagaagtatgtttgatctttattattatctacaccacgtaacatttcaacatgaccatcttcatgacgatgtatgcgtgcgtaatgtcctgttgctacataatctgcacctaaattcatcgcatgatctaaaaaggctttaaacttaatttctttattacacataacgtctggatttggagtacgaccttttttgtattcatctaagaaatacgtaaagactttatcccaatattctttttcaaaattaacagcgtaatacggaatgccaatttgattacacacttcaataacatcgttgtaatcttcagttgcagtacatacgccattttcgtcagtgtcatcccagtttttcataaatatgccaatgacatcataaccttgttcttttaagacgtgggctgttacagaactatctacaccgcctgacataccaacgacaacacgtatatctttatttgacaattatgactcctccttaaatttaaaatatattttatgaatttcagctacaattgcattaatttcattttcagtagtcaattcgttaaaactaaatcgaatcgaatgatttgatcgctcctcatcttcgaacattgcatctaaaacatgcgacggttgtgtagagcctgctgtacatgcagatccagacgacacatagatttgtgccatatccaacaatgttaacatcgtttcaacttcaacaaacggaaaatatagatttacaatatggcctgtagcatccgtcattgaaccatttaattcaaatggaatcgctctttcttgtaatttaactaaaaattgttcttttaaattcattaaatgaatattgttatcgtctcgattcttttctgctaattgtaatgctttagccatcccaacaatttgcgcaagattttcagtgcctgcacggcgtttcaattcttgttcaccgccaagttgaggataatctagtgtaacatggtctttaactagtaatgcaccgacaccttttggtccgccaaacttatgagcagtaatactcattgcgtcgatctcaaattcgtcaaacttaacatcaagatgtccaattgcttgaaccgcatcaacatggaaatatgcatttgtctcagcaataatatcttgaatatcataaatttgttgcactgtgccaacttcattatttacaaacataatagatactaaaatcgtcttatctgtaattgtttcttcaagttgatctaaatcaatagcacctgtatcatcaacatctagatatgttacatcaaaaccttctcgctctaattgttcaaaaacatgtaacacagaatgatgttcaatcttcgatgtgataatgtgattacccaattgttcatttgcttttactatgcctttaattgccgtattattcgattctgttgcgccactcgtaaatataatttcatgtgtatctgcaccaagtaattgtgcaatttgacgtcttgactcatctaaatatttacgcgcatctcttcccttagcatgtattgatgatggattaccataatgcgaattgtaaatcgtcatcatcgcatctactacttcaggttttactggtgtggtcgcagcataatctgcataaatttccatgtttggacactcctcacaattttatcaatgttccaataatagcaccttacatactatttttctacttttctgtttaactttatttataatgtttttaattatattttaccattttctacacatgcttttcgataggcttttttaagtttatcgctttattcttgtcttttttataaattttagtatttgcagatatttttttatttgtaaaatgtaacgtactattattttggttatgagcaatttaatatttatctggttattcgattggtatacttcttatatcataaaaaaggaaggacgatataaaaatggcgattaaatattcagcattaaaccttgtccctattcgagaaggtgaagatgaacaaacagcaattaataatatggttaatctcgcacaacatttagacgaattatcatatgaaagatattggattgctgaacaccataacgctcccaacctagtaagttcagcaactgctttattaattcaacatacgttagaacatacgaaacacatacgtgtaggttctggaggcatcatgttacctaatcatgctccattaatcgttgcggaacaatttggcacgatggcaacattatttccaaatcgtgtcgatttaggattaggacgtgcacctggaacagatatgatgaccgcaagtgcattaagacgagatcaacatgatggtgtttataaatttccagaagaggtttcattattacaacaatatttcggccctgctcaccaacaagcatatgttcgtgcttatccagcagtaggtaaaaatgtgcctttatacattcttggttcttcaacagattctgcacatttagctgctcgcaaagggcttccatatgtgttcgctggacattttgcacctcaacaaatgaaagaagctatcgaaatttacaaaacgttatttgaaccttctgatgtattagacgaaccttatgttattgtatgtttaaatacaatcgttgctgaaaatgatgacgaagcacaatatttagcttcatctatggcacaagtaatggttagtatcactcgtggcagaatgcagcccgttcaaccgccaacacatgaactacaaaatatattaacgccgagagaatacgcgatggctatggaaagacagaaaatatcattaataggttcagaaaatactgttcaacaaaaaattcaagattttatggaaacttatggtgaagtcaacgaaattatggcaataagttatatttatgataaagatatgcaattagactcttatcgtcggttcaagaatgttataaatcagataaatgaaaaaaacactttataatgtgataaataaactaagtgaaagtatgtatccataatattaataaaaatatacagtaacagcattttgaatgaaagatgtctttattgttcaatcatttattttagtaatgattcaaattcacttaaaattctaatgcaaatatgaaagcgccccttcaactttacactgtgtaagtgtttatttgatggggcgctttcaaaatattgaaaagcatatccaaaatttaaagaaatttatttctctttatcttcattttcttttttctcttcgttattcgatcctgtatattcatttatcttatcttttacatttttaacttgttcattatcgctatttttaaatttttctactgcgtctttagctttatccataaaactcatattaatcgctcctcttatatttgattagtttaattgaacttattttttaagtttatcaattgcatcagttattttgtttttagcattttcaacaacttcttttgctttaccagtcgctttatcttgctgaccttctttttctaattctttgttatcagtaacgttacctactgtttctttaacatttcctttaaattgatcgaacttactttcgtctgccatagtgaaacctccttggatgtatatatttatataccactaaggaggttcgctaaacattataatatgaagtttttatgttatagtatagtatttatacgattaaatataaaacatgtatccgtctaaatcttcacttgtatctacatattccgctaaatatttcaatgttgtattatctaaaacatctctcactgcatctctcatgcgaatccatagttgtttttgcgcaggtggttctgattcaatactttcaacaaatgtaattggaccttctaacagtcttataatatcccctgctgagatttcttccgctggcactcttaattggtatccacctttagcaccgcgtacacttcgaattaaccccgcatttcttaaaggacctacaagctgttctaaatataaatcactcaaattattttcttcagcaattgactttaatgatatacatccttgcccctcttttttagcaagagaaatcatcaatgtaagtccatatctccctttagtagaaattttcattgtataacctcacttaattcgaatattgatattcccattttagcattttttgagttaagatagtataagaaaggtgtgacaaatgtgagtacagaaccattagcatcgagaatgcgcccaaaaaatatagatgaaatcatttcccaacaacatttagttggaccaagaggcattatcagaagaatggttgatacaaaaaaattaacttcaatgattttttatggtccacctggtataggcaaaacaagtattgccaaagcaatttcgggcagtacgcaatataaattcagacaattgaatgctgtaactaacactaaaaaagatatgcaacttgttgttgaagaagctaaaatgtctggtcaagttatcttgttattagatgaaatacatcgactagataaagctaaacaagactttttattacctcatttagaaaatggcaaaatcgtcttgatcggtgctacaacttcaaatccttatcatgctatcaatccagcgattcgttcaagagcgcaaattttcgagttatatcctttaaatgacgaagatgtgcgccaagcgttaactcgtgcaatagaagatgatgagaatggtttgaaaacatatcaacccaaaattgatgaagatgccatgacctacttttctacacaaagccaaggtgatgttcgtagtgcgttaaatgcattggaattagctgtattaagcgcagataatgacaaagacggttatcgacatgttacattgcaagatgctaaagactgtttacaaaaaggtgcatttgtaagtgacaaggatggtgacatgcattacgatgttatgagcgctttccaaaaatctatccgtggtagcgacgtcaatgccgctttacattatttagcacgattaattgaagctggagatttacctacaatagttcgacgattacttgtaattagctatgaggatataggcttagcctcacctaatgctggtcagagaacacttgctgctattgaatcagcagaacgtctaggtttaccagaagctagaattccactaagccaagcagtaatcgaactatgcttatcacctaagtcaaattcagcaatgagtgccattgatagtgcattgtccgatattagaaacggtcatgtgggccaaattccaaaccatttaaaagatggacattatcaaggtgctaaagatctaggccgatctattggttacaaatatccacaccaatatgttaatggctatgtttcacagcaatatttacctgataaactaaaaaacaaaatttattacgaaccaaaaacgacatctaaaagtgaacaacaactcaaagaaatatataacaacttacttaaacaaaggccgtaaaaataagattaaatcgattacctttgatattttagctataatcaaatcaaaactgactagtacacgaggcatattctactatgcttgcgaactagtcagttttagttttatggtgtggttacacttgccttacgttgaaaattatccctttcaaaatgaattattgccctttgtctttaatgcgacgaactggaatatcttttaatacgtcattcaccacataacttgcacaaattaatccaacaacacttggcacaaaggcatttgaagaaggtggcatttgtccttttcgattgatagcatttttatctccaactatatcttttacatcttctcttatgacaattggactttcatctgaaaatacaactggaatccctttacgaattcctagttttttcaatttttgacgaataattttggccattggatcggtatgtgttttagagatatctgaaattgtaaaacgtgttggatctgttttatttgcagcacccatactggaaatcactttaatccctcggtcaagacactctttcattaagtgtactttgtacattattgtatcacttgcatctacaaaataatctatatcgtagttatcgaaaatttcttcatatgtctcttctgtataaaacatatgtaagggcgtgactttacaatctggattaattaatttaatacgttcttccatcaaagaaactttactttgtcctaccgttgtagttaaagcgtgtaattgtctgtttacatttgtaatatcaacatcatctttatctattaatataatatgaccaatattcgttcttgctaatgcttcagcagcaaatgaaccaacacctccaacgccaagtatgacaacagtttgttgcttcaataaatctaaaccttgttgtccaatcgctagttcatttcttgaaaattgatgtttcattattttacctctttcactgatttatacataagtacatagtaacttaaaattttatatttagcattatcactttgattattttcccaaaattcaacgaggaaacatttattaaacgctataaaacccaactaattctttattaaaaacttaaagaaacgcataaaaatacgcaagacaaagtcttgcgtatcgatagagtccgtattgccgtagttataatagcttgatcattcggcctgttatatacaggtgggtgccctgtttcttgttttgtacgtccttcatataaggcgtgtacgctgcaagaaaacccattgggctcccttgatcaaagagtgttaggcccaaattaaaaagcaaacttacgaacaactcagatgactatcttatgatgttatattaccacataattaaaattaatgaaattataacaaaccaaagtttattgattttttaaaatttagtgacgaattcgcaaagaaagttcttctaattgtttatcagaaacttcactaggcgcattcgttaataaacatgtagcagatgctgttttagggaatgcgattgtatctctcaagtttgttctattagtcaataacatgactaatcggtctaatcctaatgcaataccgccatgtggtggtgcaccatatttaaatgcatctagtaagaagccgaactgttcttgtgcttgttctttagtaaatccaagaacttcgaacattttttcttgtaactcaccatcatgaattctgattgaaccgccacctaattcataaccatttaatactatgtcataagcatttgcctcagcttcttctggcgcagtgccaagcttagcaatatcagcttcttttggagatgtaaatggatgatgtgctgcaacgtaacgtttcgcatcttcatcatattctaataatggccaatctgtcacccataagaagtttaattttgtttcatcgattaaacctaattctttagctaatttgacacgtaatgcacctaaactttgtgcaacgacatttggtttgtctgcaacaaacattactaagtcaccagcttcagcaccagttaatgtaagtaatgtttcaacattttctgtttcaaagaaacgtccaattggacctgtcaaaccatcttccacaactttaacccacgctaatcctttagcaccatagatgtttacaaattctgttaaagcatccatatctttacgagtatattgttcagctgcacctttagcgacaattgctttaatttcaccatcattttcaacagtatctttaaatactttaaagtccatatcacgtcctaattgagaaacgtcaattaattccatttcaaaacgtgtatctggtttatcagaaccatagcgacgcatcgcttctttatatgtcatgcgtgggaaagcgccattaatttcaacgcctttaacttctttaacaacttttttaagcatttcttcacccatttgcatcacatcttcttggtctacaaaactcatttcaatatcgacttgtgtaaattcaggttgacgatctgcacgtaaatcttcgtcacggaagcattttacgatttggtagtatttgtcaaatccactaatcatcaataattgcttaaataattgtggtgattgtggtaatgcataaaattcaccatcatgaacacgagatggtactaaatagtcacgtgcaccctcaggtgttgacttcgttagtactggtgtttcgatgtcaaagaacccttcatcatccaaatattgacgaatagaacgtgtaatttgatgtctcattttaaatgtttgcgctaactcttgacgacgtaaatctaaataacggtattttaatcgaatattttcatcaacgttaacattttcttcatttatagaaaatggtggtgtctcagatttattaatcactttaatatttgtaacttgtacttcaacttggccagttttaattttaggattaactgtttcagggtcacgcttcgtaactgtaccttgaacttctacaacatattcagaacgtactgtttcagcaattttcaatgcctcttctgaaaatgcaggattaaacacgacttgtacaattccttctctatctcttaaatcaacgaaaatcaatccaccaaggtcacgacgattgttaacccatccttttaatgtaatttcttgtcctaaaaatgcctcagtaactaatccacaataagttgttctcttactcatattttaacgccctctctacttcttaaaatattcgactaatgcgtctaattcaattgtttcagattcaccagttgtcatatttttaacatcgattttattattttctaattcttgatcaccaataacgattgtaaacttggcacctaaacggtctgcttgtttcatttgtcctttaattttacgctgtaaatagtctttatctgctttaataccattatgtctcaaatgatttaatagcttcacagcatatcgatctgcttgatcacccattgtaacaatgaataaatctaagttttcttcaatatctaattcgataccttcttcttcaagtgcaagcaataatcgttctatacttagcgcaaaaccaatacctgtttcacttggaccatctagcaattctaataaaccattataacggccaccaccacaaagcgttgtaatggcaccatcatagttagggttatccatcattaattcaaatgctgtatgtgtataataatccaatccacgaactaagttaggatcttcaatatatggaatacctaaatcatctaaataagcttttacttgttcataatatgccttagattcctcatttaagaaatcagtgattctaggtgcagtcttaatcgcttctttatcacggtctactttacaatccaaaattcgcatcggatttgtatgcaaacgtgattgacaatctgaacaaaattcatgaattactggttcaaagtgtttcactaacgcttcgttatattcttttcgagacgccatatcccctacactattaataacaagctttaaatgttttaatccaaatgattgataaatatgcataaccatagctaatacttctgcatctacgctaggattttcagcaccaatagcttctacaccaaattgattaaattgacgatagcgtcctttttgcttacgttcatatctaaacatcggtccattgtaataaagtttaattggttggtttggattaccttgcattttatgttcaatatatgaacgcacaactgcagctgttccctcaggtcttaatgtaatacttctatcgcctttatctttaaatgtatacatttctttttgtacgacatcggttgaatcaccaacacctcttgcaaaaagatctgtactttcaaaaattggtgttcttatttctttataattataaaatgtcattaattcatctaattgattttcaatgtaacgccatttctttgaatcttcaggtaaaatatcctgcgtccctctaggtattttaatcattttgacatctccctcggcaaactattttatttaattacctttttaaaactaaaactatatacgaccacttaactttgcacgataaatcataatcttaaaagcaaaagaaaaagcccttgcacagcctgaaactgcacaagggacgaatatccgtgttgccaccctcattggtttaaaaaacatgcctaattgtaatcatcattactttttataagcgtgcatttaataaacccactcaaaacgtttaacgtacgtttaacggctttacttttcataaagcacctcttcttgtgttcaatgtatataaactactcagcataatctttcagtctatggattatattcctacacaatcttagttagattgctacctatttcatttaccatttcaagaatactaacggttttagttataaaattcaatatcaatgataactactttcacatatttttgcaagccctacgcagaaaaataaattttaaggccatcaacaattgcttgttctaaaatttgtctatgtaattgatctttaatcatcgtttcatcagttgggttactaatataacctaattctaataaaacagcaggaacttttgtttgtcttaacacttgataattttcttgtcttgaaccgcgattagaaagtagacctttcttctgaatcgtagcgtctaacgtatctgctaaagctctttgattatcatgataccaataaactgtcattccatttgcattagatgattctaacgcatcattatgtatactcaaataggcatcgcctttgatatcacgattttctagtgaaacatatgtatcgtctgttcttgtcatcttaacagttgcgccttctttttctaaagtacgctgcaattcttttgctgttttcaacgtataatctttttctaaacttttatatttagtattgcttgaagcaccctggtcactacctccatgaccaggatcaagcactattgttttaccttgcaaaggatttttctccttcgtattatccgcgacaatatctaaatttgtgtgccatccagctatccaacctttttcattactggatgtatcttcaacttcaatccatttacctactttaccaatctttttaaaatggtcacctttttcaactttatatatgactggatacgcagcgtttggacctgtacgtaattcagcattttcagttatcgtgatgttcccactatcttcactattgctattcagcaataaaaataaaaagatgataaataagacaaaggcaatcactactattagagtacgtttatttttaagaccctttttagataaccatgcctctatttttttcattgaattttgccgtcctgactttcataaataatagtgactggaccatcattatttatgctaacattcatgtgtgttccaaattcacctgttttcacagtaagaccatacgctcgtagcgcatcattaaaatactcataaatttttaccgcttgatcaggatttttagaatttgagaaacctggacggttacctttttttacatctgcatagagagtaaattgtgaaactgatagtatttcaccattcatttgttggatattaaagtttaatttattattgtcatcttcaaataatcttgcattagcaattttctttgcaattacatctgcatcttgctctgtagagttctgaccgataccgactaataaacaatatccttttttgatttgattatttaatgtatcattcgtcaccgatgcttctttaactctttgtacaactactttcatattttgcacctctagttccaaactcttgttactgtataaacatcaccaagttgtttgttcttttctaccacacgataaacatcattcacgtttttcaccatgacactaatatttattattgcatttttatcaatatctgaacgtcctgaaactttaattaaattgccggctgtcgagctaacagcttgtagtacttcattcaacaagccatttcggtcatacgcagttacctctaaatcaacctgatatttttgagttgcgtcttttgattttacccattcaacattaattagtcgttcagtttcgttcttaatatttgggcaatcagtgcgatgtactttaataccgtgacctttggtgatataacctacaatatcatcacctggtataggattacaacattttgacaacttgataagtacattttctaaaccttctacatagacaccactatcagtaatgatgttgtctttaataggcaatgatttcgtaacttcttgtgcttcatttaaagcacgttgtttatctaaaatacgttgtctttcagttaatttattaacaatctgtaaggatgtcacgccgccaaatcctacagctgcgaataaatcatcttcatttgcaaagttatatttttcattaacaacctgaatatttttctctgtcaaaatatcttcgactctaaatccttgctcttttatttcagcttcaaccatcattcggcctttttcaatattagatgaacgatcttgttttttgaagaaacttttaattttacctttggcactagacgatttaacaattttcaaccaatcacgacttggtccatatgaatgtttactagtacgtatttcaacaatatcgcctgtttgtaaaatatagtcaattggtacaattttgccattcaccttggcaccaatcatcttattacctacttcactgtgaatcgcataagcaaaatcaatcggcacagcaccatatggcaactcaataacatcactcgctggggtaaatgcgtatactttgtcactctgtaagtcatattttaaggtttccataaattcttgagcgtcagacgatgtatgatccgcttcagctaattcttttaaccaatttaacttattttgataagtttgatctttttcacttacttttttaccttctttgtaagcccagtgtgctgcaacaccatgctcagcaatttcgtgcatatcaaacgttcgtatttggatttcgagcgggtctccatttgggcctactactgtagtatgcaatgactgatacaaattttgtttaggcattgcaatataatctttaaaacgtcctggcatcggtttccataacgtatgcaccaacccaagtatcgcataacaatcattaatagaattgacaataacacgtatcgccaacaaatcaaaaatttgatcaaattgttttttctgcttcatcattttccgataaatactgtaaatatgtttaggtctaccatttatatcgccttcgatattcattcggtccatttcagtacgtattctatcaatagccgtttcgatatacgcttcacgttcactacgtttcttcttcattaaattgactattctaaaatattgcacattatcaatataacgaagagccgtatcttctagttcccatttgattgtattaataccaagacgatgtgctaatggtgcataaatttctaatgtttctcgagaaattctaatttgtttttcgcgcggcatggctttcaaggtacgcatattatgtaatctgtctgctaatttcaccaaaattacgcgtacatctttggcaatcgcaataaataacttgcgatgattttcagcttgttgttcttcttttgagcggtattttacttttttaagcttcgtcacaccatcaacaattcgagcaacttcttcattgaacatttcttttacatcttcaaatgtatacggtgtatcttcaattacatcatgcaaaaaacctgcgacaatcgtcggtccgtctaatcgcatttctgttaaaatacctgcaacttgtataggatgcataatgtatggtaatccgttttttcggaactgacctttatgtgcttcataagcaatatgatagctttttaaaacatactcatattcatctgctgacaaatatgattttgctttgtgaagaacttcgtctgcactatatggatattcgttgttcattatatgatacaccccattcatatttattacttcgccttaaacaatgatttaggtactcttgttgaatagtatttgtcccacaccaatcatacgtccgtcgacgataaatatttatcctgtcgtcattaatcgtaatattaattttacttgagcgagtttaatttgtatactattcctacttttaaaacttttacaaaaattcgacctaaatctactgtttcattttttaaatattagttctatgatactacaatttatgaaataaataaacgatgttattaaggtataatgctcaatcatctaacattttcagtaaataaaaaatcctaacatctcatgttaagaaaacttaaacaacttttttaattaagtcattggttcttatacatttgatgaaggatttcatttgataaaattatattatttattattcgtcgtatgagattaaactcataacatcgtaatctttaattttttcaataccatttaaatatttcaattcaattataaatgcaatacctactacgataccgcctaatttttcaactaattttattgctgcttcaatcgtaccaccagtagctaataaatcatctgtaattaacacacgttgacctggtttaattgcatctttgtgcattgttaaaacatttgtaccatattctaggtcatactcataacgaatgacttcacgaggtaatttcccttcttttctaacaggtgcaaagccaatccccattgaataagctacaggacagccaatgataaagccacgcgcttcaggtcctacaacgatatcaacatctctgtcttttgcgtattctacaattttatctgttgcatagccatatgcttcaccattatccataattgtagtaatatccttgaaactaacacctggtttcggccaatcttgaacttctgatacgtattgctttaaatccattaatatttcctcctaaattgctcacgacaattgtgactttatccaattttttatttctgaaaaatcttgatataataattgcttttcaacatccatacgttgttgtcttaattgatatactttgctggaatcaatcgatcttttatcaggttgttgattgattcgaattaaaccatcttcttgtgttacaaattttaagtctaagaaaactttcaacatgaatttaagtgtatctggtttcacacttaaatgttgacacaataacataccctctttctggatatttgtttcttgtttagttattaatgctttataacactttttaaaaatatccatattaggtataccatcgaagtaaatcgaatgattatgttgcaaaactatataaagttgagaaaattgcagttgttgcaaggaattagacaagtcttccattgacgttggtaaatctcttaatactactttatcagtttgttgtttaatttcttcaccataataatattcattcgcatttactttatcacttttaggatgaataagcacgacaatattttcatcattttctgtaaaaggtaaactttttcgcttacttctataatctaatatttgctgttcattcatcgcaatatcttgaataattatttgcggtgattgattaccattccattcgttgatttgaacagatcctaatatattaattggctgttcatcttgtaactcaggttctaagtgtccattttgccaaaatagcgcggcgatattactttcaccaagtgtcaattttagatgatttttttgttgacctatcgccttaactgaagaaactgataaatcatccatttcaaaaataggtctagaaaaatctgttccgaagggtcttaaacgattcatatcacgaatatttttaatcgttatatcattttctgttaataatacatctacttgctttacgggatctaacgaagttgttttagataattctttcatccatttatttaaaccttcagctaacgattctatattttcaatatccatcgtcatacctgcagccatatgatggccgccaaatttagcgattaactcttgatgtgctgatagtatttcaaacatcgacacttgatcaattgatctggcggagccttttgcatgattttgctccctatcaatatttaaaattaatgttggcaaagcaaatgtttcgacaattttcgaagcaacaatacctaagacaccttcatgccaattttcttttgctaaaagtaaaaataaatctccctttttaactttcgtttctgccatagccattgcttcttctgtgatagttgctacaatatcttttctttcacggttaaaatgttcaacttgttctgctaaaaatgcagcttcttcttcgacgtcagtcatcaacaattcgcaagctaatgatgcgtcatctaaacgacctacagcattaagtctaggtccaataataaaaccaattgtttcttcatcaatattgtcattgtatcccgcttcttttagcaatgctttaacagaggtcggacattgatcatttaagacttttaatccttgtttcactaatgatcgattttcatcagttaaggatactaaatccgcaatggtacctatcgcaactaatgctttaaaataatcaggtacattttcaatcaatgcttgtgctaatttgtatgcaacacctgcaccacacaattgttggaacggataattaaacgatggatgcattggatgtacgattgcatatgcttctggtaatgtactaccaatttcatgatgatcagttacaatgacatcaactcctaaatcttgaaccattttaatttcattatgaccttgtatgccattatcaacagttatgattaatgttatgccttcatcatgagcatttctaaatgctagttcgtttggtccatatccttcggtaaagcggttaggaatatgccatcctacttgtgcacctaaaagttgtaatgttatcactaaaattgtagttgcggtaacaccgtcggcatcgtaatcaccataaactaggattttctcatcattcgctatcgctcttttaattctttcaatagtcttagtcatatcgctcaattgcagtgcatcatgattgatatctgtatctgaaatgatggattctattgcttgttcatcaataatcgatttactttctaatattttttttacgattggcgttaactttaattttgatgttaattcatcacttatgtattcagctggtttagttaatttccacttatacttcggtttaatcatatatatttacgcctcatttccaaaagacattatatctaaaattactttaaataaaaagcacttatctaaataatcaagactttaattataccattttttaaaaatgaatgcgggaacttatttatatatattttgttaaatttaaataaagtaaaaagcggtatgtgaactctttattgtttcacataccgcttaattcattttaaactaaaatcttttcatcgttcgatttcttttctttatatacaactaatttgtgtttcggcgattttttcaactgacgttttttcattattccccatagcggaacggcaatgaagattgaagagaatacaccagaaatcaatccgataaataatgctaaagtaaagttgaatatcgtaggagcaccgaagaatagtatagcaactactactacaataactgttaatactgtattaattgaacgtgtcattgtctgtctaattgatctattaacgatatcatcaatttgttctgttgtcgtaatcactttaaccttttgtaagttttcacgtacacggtcaaacgttacgattgtatcattaattgaataaccgacaattgttaatacagcggcgataaatgttaaatctacttcaattctaaataaactgaaaatcgctactataatgaatacatcatgtaataatgccaatacagatgaaagacccatgcgccattcaaatcgtaatgatacatagatgatgatacctatcgatgcatagattaatgcaagcattgcattttttgctaattcctgtccaataattggtgatacagtgttaatttgaggtgtgtcaccgaatttcgatttaatattatcactcaatttattatcttgagcacgcgttaaatcgtctttaaattgaacagttgctactttattgtctttaccattgatctgaatttgatccgctttaagtccactatcttttacaacttgctctaccttttgttgagtaattgcttgtttagattggaaatctacgcgtgtaccacttgagaaatcaattcctaagtttaacttgaagatataaagaataactaaaccgacaactacaattaaaatacttactccaattaatggcttagctaatttaacaaaattccatttctcgaatgaagttttaaggtcatgaacatctacaccttcattaatatcatgtcgtttattctttttaacaccaaataaccaaaattgatttttgaatatatttgatgaaacaagtaatgataataagaatcttgataagaacacggctgtaacaaagatcattagaatacctaataataacattgtcgcgaaacctttaactgaactttcaccgaagaagaataatactgctgcggcgataactgttgttaagttagaatcaaaaattgttaggaatgaacttttgtttgctttagaaaaggcttgctttatcgttctacctattcgaagttcatccttaatacgctcatacatgataatattggcatctacagccatacctacacctaataccaacgccgctaatcctggtaaagttagaaccccggaaatgaaattaaatgctactaacgttagatagatataagttgtcaatgcaataatcgctactaaaccaggtaatcggtagaatccaagcatgaataaataaattaatgctacaccaataaacgatgcaaacacagttttatctaatgcatcttgaccaaattgggcacctactgagtttgaataaatttctttcaagtcaactggtaaagaacctgcatttaacaattcggcgatttgttttgcttttttaacgccttcttgtcctttaaatccacccgagatttctacgctatcagaattgattggttgatcaacacttgctgcagaaataaatttagggtttttcttttgtgcttcttttttatagctgtcaccttttttgaaatctaaccaaacaaccatgacattatcacgtttcttagagatttcttccgttacttttttaaatttgtttttgtcttttactttaaaagtaactgtaggctggtttgtttcctgtttaaattcttgtttggcagatccctgtttaatatcagaaccgcttaattttactttatcttctgcatcgcgaattgttaaattagcttgagaagataaaattttacgtgcttcattctggtctgttacaccagcaagttgtactctaattctattaggttcttcaacttgaattttaggttccgaaacacctaaaacgttaacacgattttctaatgtttgcgctgttgattgtaaggcttttttatctattttgtcgcctttatttaaaggatcgacttgataaagcacctcaaatccaccttgcaaatcaagtcctaaattgacattctttataacacttttataagttgcagccattccggcaaacaacaatacgactaaaagcaagaacgcaattattctactacttttcttcacatgaacacctcattatttacgtatgtatttagaatacttgaatactattttataacgcaagttaaatctttcttacaaaatttattagccttatacatattaacatactagagcagggagtaaaaatagtcatagatatatttaatttaaatttaacaattattatgtatcacaatttctttttttggaataaaaataagctattctacatactacttataacttaaaaaggatgaaacgctattcgtttcatcctttttaataccacttctcattatgaagggtcaacttgtttaatagcaggtttttcgaaagttaattcagtaccatgaccattaactgtaataacaacagttgtttcatctactgctttaacagtacctttaataccaccaatagttgtaattctttgaccagattgaatgttattaatcaactcacgatgctgtttcgcacgtttttgttgtggtctgatcatcaagaaatacataaccgcaaaaattacgactatatatattagtaatgaaaattgcattttatacgctcctcttgcttaaaagttttttgggttctcaacatttaatccatattgctcgaagaattcttctttgaaatctaaaagacgatcttctcgaatggcttgtcttatatcttccattaattttagcagaaaatgtaaattatgaatagtagtaagacgaataccaaaagtttcctctgccttgattaaatgacgtatatacgctcttgaatagttttgacatgtataacagtcacaattctcatctaacggtcttaaatcatctgcaaattttgcatttttaataactaaacgaccttgcgatgtcatacaagtaccatttctggcaatacgtgtcggtaagacacaatcaaacatatccatgccgcgaatactacattcgattaacgcatctggagatcctacacccattaaatatcttggtttatctttaggcataaactgctctgtatgttcaaccattttatacataaccggtttaggttcaccaactgacaaaccgccgattgcataaccaggaaaatctaattctactaaatcctttgcactttgttctcttaaatcttcatattcgccaccttgtataatgccgaacaatgcttgatcttcaggtctttggtgtgcatctagacatcttttcgcccaacgtgttgtacgttcaatagatttttttacataatcatattcagcaggcatcggtggacattcatcaaatgccatcataatatcagatcctaaatcattttgaatttgcattgatttctcaggactcaaaaataatttagacccattagtatgatgtctaaattccacgccttcttctgtaattttacgtaaattacttaaactaaacacttggaaaccgcctgaatctgtaagaatcggaccatcccaattcatgaatttatgtaatcccccagcgtgtttgataatatcatttccgggttgtaaccacaaatgatatgtgttgcccaaaatgatttttgcttcaatttgtcttaactcttctggactcattgttttaacggttgctttagtaccaactggcataaacataggtgtttcaaatgaaccgtgtggtgtgtgcacgatacctaaacgcgcacctgattgtttacaagttttaatgtgttcgtatgttactgcaggcatattcaaaatcctcacattctttttatataattaacattgcatcgccaaaactaaagaatctatattctaaatttactgccgttttataagcattcagaacattttcacgactactaaacgctgatactagcataactaatgttgattttggtaaatgaaaattagtaatctggccatcaattgctttaaaatcaaatcctggataaataaatatattagtccagccactcgtttcaacaaatttatcatgatcgcgtcgaattgtttcaagtgtacgtgttgaagttgtaccaactgatataatgcgatgtcctttggacttagtatcatttaataaatcagctgtttcttgtgtcatttgataatattcactatgcatttcgtggtcattcacatcgtctacgctcaccggtctaaacgtacctaacccaacatgtaatgtaacaaatgcgatattaacacctttatttttaatttcaattaataactcatcagtaaaatgtaatcctgctgttggtgctgccgctgaaccactttctttagcgtaaactgtttgataacgatctggatcatctaaacgttctttgatgtatggtggcagtggcatttcccctaattcatctaatctttcttgtaaaataccttcataatgtaaacgcatgatgcgtccaccttgatccatttcttttatgcattcagctataattttgccattaccaaaattcaatttattaccaactttaatacgcttagctggtttcagtaagacttcccaatcattaccttcaatttgagttaacattaacatttcaacttttgcaccagtttcttcttttaaaccaaaaagtctagctggcattactcgcgtatcgttaagcactaatgtatcaccaggtctaaaatactcaatgatatctttgaaatgtaaatgtttcatttcaccagtttctctatccatgactaataaacgactatgatcacgatcttttaaaggcgtttgagcaattaatgattctggtaagtcatagtcaaattcttcaatattcacgttattctctctcctcattcgactttgcaaaatgttcataagctaatggtgttgcttttctgccacgtggcgtacgttctaaaaagcctttctgaataagaaatggctcataaacgtcctcaattgtaatacgttcttcaccaattgttacggcaatcgtatctaaaccaacaggtccgccattatactgcttaataatacagttcatcattttatgatcaatgtaatctagtccgtgttgatcaacttgaagtaaacctaatgcgtgcttcgttgtttcaatgtatatttgttcatcttcattcacttgctggaagtctcttacccgcttcaatagtcgatttgctactcttggagtccctctagaacgtttagcaagttcaatggcactttcttcatcaatacctgtgcctaaaacctcagctgttctaataatgatttcttttaaatctgattcgttataatattctaatcttaagtgcacaccaaatcgatcccttagtggacctgttaagctgccagctcgcgttgttgcacctaccaaagtgaatggaggtaagtcgatacggatacttctagcctcatcgcctttaccaatgataatatctaaaaagaaatcttccattgcagggtataacacttcttcaacaacactactcagtctgtgtatttcatcaataaacaaaacatctccaggttgaagtcctgataaaattgcagccaaatcaccaggtctttctaatgaaggccctgatactgtacgtatattaacttccatttcattggcaatgatattagataatgttgtcttacctaatccaggggggccaaaaagcaatacatgatctaatggttcatgacgaagtttagccgctttaataaatacttctaaattactttttattgaattttgaccaatatattgtcgtaatctcgtaggtctaagcgacaattcgaaatcagtttcttcactatgcattgattgatcaaccatacgctcattcatgacaacacttcccctattaatctatttaaaattaagatacaactaattgaagacctgccttaacagcttcatcaactgagtcatatttatttttatttaacgttttctcaacttttgcaagctctcgtttagaataacctaatgcttctaacgctaacattgcttcttgcacgaattgatcttgcaccgtcgaagtagcgtctacttgtaataatgaatcgctatcttcttcagtaattttcactttaccttttaaatctaagacaatctgtcttgccgttttcttaccaattcctgggaatttagttaaatacgtatcattttcattttcaatggcacgttttacttcattaggcgtacttgtcgctaaaatagctaaagctgatttcggaccaataccagtaactttaattaaactcaagaacatatctttctcttcttcactactaaatccatacaataattgtgcatcttcacgaacaattaaagatgtatgaattaaaacttcatgatctagatgcttttgaaaacgataagaatttggtgtttgaatttcataaccaacaccagcagtttcaacaactacgtgtgtaggatataaatgtgttaacttacctttgacatacgcgtacattataggcacatccttacatactcatactaattaattctacttttgatacataatctaaatttctcaaagcgccaataacatcttctactgaagtttctttagatttagcattcagtgataatgttattgttgctttttcttccattggaatactttgatgaatcgttaatacagatagttctaactttgatataacatctagtacacgtgccaacataccaacaatatcagttacatataaaattaatgtaaattctcgatggtcaagcattttatcgtctactggaaatatcgtttctctatatttataaaaagcacttctagatagatcaaactgtttaacggcatcataaatggacaatgtcggatcactttttaaggcatctttaatcttcaatgttttaaccacggattcaggcaagacatcttctctaattaaataaaactttttataatctttattgtccatcatgtttcgctcctattcaacgaattcaaattctccgccaagaattctaacgatatcaccatttttacaaccacgttctctaagcgcatcatcaatacccatcgaacgcatttgacgagcaaatcgacgtactgctggatcactgttaaagtcagtcattttaaacattctttcaatagcattaccacttaccacataagcaccatcatcatctcttgaaattgtaaatttatcttgtgacggtgtatgtttatataatactcggttaatgccaactgactcctcttcttcaactgtgaagtcaacatctttatattcttctaatttatctgctattgcatataataattgatcaatattatcacgcgttattgttgaaactggaataactggcacatcttcgccaatttcttctttaaacaagtttaaattatcttgtgattcaggtaaatccatcttgttagctactacgatttgaggtctatcttctaaacgttgctcgtacgcagctaattcttgattaatgactttataatcttcaataggttctctaccttcagaaccgctcatatcaatcatgtgaacaataacttttgttctctctacatgtcttaaaaattgatgtcctaatccaacgccatcagatgcaccttcaattaaacctggtaaatctgccataacaaaactacgttgatcaggcgttgaaacaacacctagatttggtttaatcgttgtaaaatgatatgccccaattttaggcttagcttttgaaacgatagataataaagtcgatttacccacactagggaaacctactaatcctacatcagctaataatttcaattctaaagatacatctaattcctcacctggttcacctttttcactgaagtcaggtgcagggtttctaggtgttgcaaaacgtgaattacctcggccacctcgaccgcccttcgctactacagctctttgaccatcttcaacaagatctgctaacacttcgtctgtttcaacatttttaataattgtaccaggtggaacttttaatactaaatcttccgcatttttaccatgcatattactactttggccattttcacctttgcttgctttaaaatgacgttgatatctaaaatctaataacgttcttaaaccttcatccacttcaaatacgactgaagcacctttaccaccgtcaccgccagctggtccaccaaatggtacatatttttctcttctgtatgcggtaataccattaccaccatcaccggctttaagagatattttgacttgatcgacaaacatatatctcacctcttttacatataattttcattttcccaataattatagcatattagagccccttatatattgtaaataattaggggctcttatgcagttacttttataaatctttgctttaaaatacttatatttctcagcaccaattgtggtacagtttattctttaaacgctgcaactgtattcctttgtcccccttatagtttagtgattaggggctcttatacagttgcacatttagtataacgtctaaaattcccattttttaataacataatgaaaataataatgaaaaacattttataaaaagtaaaaaacaccagaagattcacttctggtgttaactagacaaaattattcagctactgcatatacagaaacttgttttttgtcgcgacctttacgttcgaatttaacaacgccgtcgattttagcgaataatgtatcatcgccaccacgacctacattttcaccagggtaaattttagtaccacgttggcgatataaaattgaaccacctgttacgaattgaccgtcagcacgtttagcacctaagcgttttgattcagagtcacgtccgttttttgtagaacttaccccttttttagatgcgaagaattgtaagtttaattttaacatcggaatgcacctcacttataatttaatctaatattctcattatattcttcttcaatagtttgtaaagacacaagcattgtttgaagaattagttgcgcttcatcgttgtttgtatcaacgcttcttatatgaaaatgaccaccattgtcgtcataattgatatctggtctctcagatgtcaatcctataatcgcattaacactaccaaacaatacagctgaagctccagcacaaacgatatcatgaccatattcaccatggtcagcatggccatccataataacgtctgttactttgccttcatcattaactgtaatatcaacagtaatcataataattacgcgttgattttatcgattgttaatttagtgtatggttgacgatggccttttttacgttttgaatttttacgacgtttgtatgtgaatacagtgatttttttaccgcgaccttgtttattaacagtagcagtaactgttgcaccttcaactgttggcgctccaactttaactgaatctccacctacaaataatactttatcaaatgtaaaagtatctccttcgtttacgtctaatttttcaacgaagatttcttgaccttcttctactttgatttgttttccacctgtttcaataatagcaaacatactttgcacctcctgtataataagtcacgccatacataggtgacatttcgttattgagtcaagcgtttgcactctgtgggaaaatcgctttcttcattaaaaatgttcttgaacctatatttgagcggttgtatgtagctacttataactactcaactattgcatcttaccattgacgacgtttcatgtcaatgtcattgtttgtttttttaaggaactttataatcaacggataaagcataatcaacagtacaaaattcataattaatgttggcaataatctaaagactacaaaatgaataatatcaaattgaatgaatcctaacataccgtatattaatgccacatagacttctaataataaggtgctggctaatataataatgaataacatcgaatgatctttgtaaaaaattttaaagaatcgatctataagtgctaaaaacaatatatagccaaataagtacactccataaatactaccaaagtatacatcagtcattacgcctaaaaatatgctgagcaataatgatacgccaaagccacgatacactaccatcattaaaatatacataaatgtaaggtgtggtacaaatacaagttcaaacttacctatgtgcattggaataagaagcccaattgcagtatctatataaaatagtaaaatacctatcaaaaaataatacagtgtacgcattatttatccctgctttcatcatcaggaattgttttaggatctctttttgcaacataaacatgactcaaatctgttaagtccgcaccagtcttaaccctaacttctttagctaagccgtattgatcattttgaaccttagtcacttctcctatatataaattacttggtagttgatcagctaatccacttgtaacgactttatcaccttttgagatattatctctattattaatgtcactaattacaagttctgagttcttttcatcataacgatcaattaaaccaaatatatttttagaaccgtgttgtatatttacagataatttacccgcacgtgtattagttgagattaaatcaacttgtgaagaaaatttattaactttagtaactcttccaacaaaaccttgtgatgtcatcacagccatatttgaagttatacctgatttagatcccttatcaattacaattgtattcatccactgatccggatttcttgccaaaaccgtagtagaaataggatcaaattttgaaatatcttttaaatcaagctctttttttaatttttcattttccgcttctaattgttggttcttagattctaactggctaatcttatttttagattctttagaatctccttttttaaaaaagtccccaatcgtaccagcaacaaaattaactggataactcacaactcgttgtccaaaagacacagaatcacctatatattgttcaggaggtgattgagattgtgaacgtatggacagcccaattaatgcaataaaaacgataattgcacataaaacaacaattaatttgttatttttaaaaaacttaagcacccagaacacctctattatgtcaaaatattgtatatccttttctattttatattactcccattatgaaataaagcactaactacgaattactttgaaaatgaacaactccgtaaaaaatttgtggcattttaaaaacaaaaaaactactagcaaacattccagtcactagtagtttaaataatcgatttaaattttaaaattatttgtttgtatcgttcgaggattcactgttcgaattctgaagttgtctccaacgtgcgaataagttctgggccttttgttgttcattagcttgtttctgttttgattgttctgccatttgaactacaccaaccttttaaatttattctagtgacaggataactaaaatatatttcttatgcaataatttcctattgataagcattttcagattttagttgtaaattttgccctaattcatttaagtcttgttgcatttcaaattcagtattgtaaacacgcattgactcatctccaaatttataaagaataaattcgtctcctctttgacctataatatattgatcattataagccatgcgattcattccagacacagccataaactcttgtttatctatcattttaaatacatttttaatttggcttaatggtacattctttattaaatcattttcttttaatgaatatttctcaccacttacataaacatgttgggcatcattagtgggttgcgtaacttgattcatttgatcattatcgtgatttacaggattccaatcttgttcttttaaaaaaggtgcgtatttcaaggcgatataaacaattatcacaattgctattactgctataatgtttttaatcatactaaatatcaatctcatagttcgcctccaatgtcttcatctaattatatattttattatgtatattttcctcagtcttcagccttaatcatgatatatcttaggactgatgcacgttcatttaaaatagcttataattttgttatgatttaaaagcgtattaggaggtttgtagcattgagtatactaacaattattttaatagcactattagtcatcctcctttttagagttggactttctattttgcgatttttaatttatgtcggacttgttttattatgtatttacttaggatatcaaggtttaatttggttgctcgatttttttcaaataaatagtggatttttaccgcactttcaatttaacaattaaatttattctgcataacaaaactcctaatgtactagtttagaattttttaactagttccacattaggagttttagtttgttttcaagcacggatactacttgatgaacagattactattacttacgcccaaatgcgttagataaaaatcgtatcagcgcgtagctaccacttagtaaaaggccccaaacgattccagtaaaaattgagccaattgctacacttaataaaggaaaagcttgtttcgtaacgattacacctgctaacgcggttactaaaatacctaacgtagataaagctaatgttattaaaagattgcgctttgttacaggttcatttttaatatttaactgcatggtataaaccattggcacgagaaccccgataataataaatagagtcactatttttcctccaatgaaagtacttcgtaggtattatacacaagatacgtcattaattctatcaacttcaatcattttcatcaaagtaacccgcttctacaagactggtaaatctattatcaccgattataatatgatccaataaatctatccctaaaatcaaaccacactccttcaacctcattgttgttatgatatcttcttgtgagggcgttacatcaccggatggatgattatgaactgcgatgattgcattggcattttctctcaccgcaatactaaaaatttcacgtggatgtacaatcgaactatttaatgtacctttaaaaacacaggtttctttaatcactacattttttgaatttaacaataaaatgacaaaatgttcttgtgttaaatctttcattgttggaatcatataatcagcaacatcacttggttgcgttatttttatacgattattttcagctcttctccccatcctttcccctaactcaaatgctgcttttaaagtaattgctttttgtaatccaatccctttaacttttatcaaatcgttaattgaagattttttcaattcattcagattcgaagcagatttaagcagttcattactaatgtctatgctcgagaatccttttcttccggtgttaattaatatagctaataattctgtattcgaaagactttttgcaccatggcttaacaaacgttctcttggcatttctgaagttaccatttctttaattttcaaaaatatacgcctcctaaaaattgatggatatcattataaaaaagtgaattgataaaaaaggaaataaatataaatggaacaaggggtaatagtttaatcggcttaaatatcatggtaattaaagcaactaaaccagcaatgacaaatgtaaataaaatgacataaatagtgaattggagagggaaaaacaaagaaagtgcagatattagtaaaacgtcaccataaccaatatatgcccgaaataaaaagtagaatatatgcgtggtcatactaataatgataaaagctactggataaatcatacttaacgagagagaaacgatacaataaattataattaagcgacaatctaacattaaagaagtgatatcggtcatagtaaaaataagcagaaaaacatatgtagttataaatagcgtagcatttacgtatgtgaaatcatacttaataaagacgataggtattaaagcaaaggtttcccctaagaaatgtgttagggaaatacgctttcgacagtttcgacatcgcccttttaataataaaaaactaataatcggcattaattcataccatttgagtgacgaattacaataatcacatttcgatcttctatgtaaataatcaaatgacgtttcttctatagatataaattgatatagaaaactaaaaatacaactgcaactataagataacaatactaccaaatgacaacctccttatgtaaattatagttagttattaccaaaatgtaaatatacactatttttcaagaattgaaccgctttttcatttaaatttttcaatattgctaagcataattgatggatactttaacaacccattactgctcggcaaaattaataatggcaagaaattgaaccttataaacacatacgatttagagcataaaaaataaccatgaagctctacctattgattaaatagattcttcatggctattttagttttagttttataatgcttcaaagtctaattttgatttaacttcacttatgaaatacagactaccggtaattactaatgtatcaccttgataattttttataaattcaacgtagtcatctactaattgtatttcatcattttcaatactacctacaatttcttctttgcgtaacgctttcggaaaatcaaattcagttgcataaaacgtatgcgcaattaaacttaaatgtttgaccatctcgttaatcggttttccgtttattgctgagaacaaaatatctactttttctttatcatggtactgtttaattgtatcaattagagcatctatactctctgaattatgtgcgccatccaaaatgattaaaggtttgtcatgcacctgctcaatacgtccagtccaacgaactgattcaataccgtctatcatcttattgaaatctaattcaattaatccttgttcatttaattcaataagagctgttatggctaatgcagcattttgtttctgatgttcacctaacatgcttaaaatgattgtttctaattcataatctttataacggtaagtaaattcatcattttgcgatacaacaacaatttctctatctaattcaattggctttgcatgttgttcaattgcgcgttcacgaacatattttaatgcatcttcatttttaacagcatatatcactggaacgttaggctttataatcgcgcctttatccctagcaatatctagataagtaccacctaaaatatctgtatggtctagaccgatactagttaagattgataaaaccggtgtaaagacatttgtcgaatcgttctttatacccaatccagcctcaacaatgacaaaatcaacaggatgtatttcaccaaaatataaaaacatcatcgctgtgattatttcgaattcagttgcaacacctaaatctgtttcacgttccatcatttcacttactggtttaatacgtgatactaattctacaatagcgtcatttgatattggcacaccatttagactaattcgttcattaaatgtttcaataaacggcgacgtaaatgtacctacttcataaccattttcaactaaagctgttctaaggtaagcaactgtagagcctttaccatttgtgccacctacatgaatacccttaatgttattttgaggattattaaattgtgctagcatccattccatacgtttaacacctggtttgatgccaaatttagttctttcgtgtatccaatacaagctctctaggtaattcattgttactaactcctatgcttttaattgttcaattcttgccttcacaccatcatatttttcttgataatcttgttttttacgtttttcttcatttataaccttttcaggtgctttacttacaaagttttcattagagagctttttatctactctatctaattcgctttgaagtttagctaattctttttccaaacggctgatttccttatccatatcaattagcccttctaatggtaataccactttacctgcaattacaactgatgtcattgctttctcaggaatttccacgtcagtgctaatatttaaggtactaggattacagaatttgattaaataatctttgttttgtgataaagttgtttcaatttctttatctttagcttgaattaaaataggtatttctttagacaatggcgtatttacttctacacgtgattgtcttacagatttaatgatttcaacaagttgttgcattgtttgtttactttcttcaaaaatcaatgattcacgcacttctggccatgaagctttaacaattgtgtcaccttcatgtggtaaactttgccatattttctctgttacaaatggcatgaatggatgtagcattctcataatattgtctaaagtataactcaatactgaacgtgtaacttgtttttgttcttcatcattactattcattggaattttactcatttcaatgtaccaatcacagaaatcatcccaaatgaaattatataatgcacgtccaacttcgccgaattcatatttgtcacttaaatcagtaactgttgcaatcgtttcatttaaacgtgttagaatccatttatctgctaatgataagttaccacttaaatcgatatcttcaactttaaagtcttcaccgatattcattaaactgaaacgtgccccattccagattttattgataaagttccacactgactcaactttttcagttgagtatcttaaatcatgtcctggagatgaacctgttgctaagaagtaacgcaagctatcagcaccgtattcgtcaataacatccattggatccacaccattacctaatgatttactcatcttacgcccgtcttcagcacgaactaaaccgtgtaataatacatcattaaatggacgacgatctgtaaattctaagccttggaatatcatgcgtgctacccagaaaaagataatatcgtaacctgtaactaaggcatttgttgggtagtatcgtttaaagtcttcactttctaaatcaggccaacctaacgtagagaaaggccataaagcacttgagaaccacgtatctaatacatcttcatcttgttgccaattttcaatatcagttggcgcttcttctccaacatatatttcgcctgtttctttatgataccaagccggaatttgatgaccccaccataattgtcttgaaatcgtccaatctctaatattttccatccattggttaaatgtatgttcgaaacgttgcggataaaaatcaatacgatcatctgttttttggttatctaatgaacgtttcgctaagtcttccatgcgcacaaaccattgtgttgataaatatggttcaacaacagcgccagatcgttctgaatgacctacagaatgaacatgatcttcaatcttgataactaaatcttgttcttttaaatctttaactagctgtttacgacaatcaaaacggtccataccttcatatttacccgctttgtcgttcattttaccattttcatccataacgataatattttctaattgatgtctttgaccaatttcaaaatcattagggtcatgtgctggtgtcactttcatagcaccagaaccgaagtctatatcaacatactcatctgctaaaataggcagttcgcgtcctacgattggtaatataacagttttaccgattacatctttgtatcgttcgtcattagggttaacaacaatcgctgtatcacctaacatcgtttctggtcttgttgttgcaatttcaataaaaccttcaccatcagcgtaaggatatttaaaatgataaaacgcaccttgaacatcttcatgtattacttcaatatcagataaagctgtacgtgctttaggatcccaatttataatacgttcgccacgataaataattcctttattgtataaatcaacaaaaacttttttaactgctttacttaaaccttcatctaaagtaaaacgttctctactataatctaaacctagacctaatttagcccattgcgcacgaataaatgacgcatactcttctttccaatcccatgcctgttctaaaaacttttcacgaccaagatcatatctagttattccttgttcatttaatttagcttctacctttgcctgtgtcgcaataccagcatgatccatacctggtaagtataacgtatcgtatccttgcatacgtttcatacgtgtaatgatatcttgtaaagtcgtatcccatgcatgtcctaaatgtaatttaccagttacatttggtggcgggataacaattgtatatgtttcttttgatttatcttctgacggtttaaaataaccattctttacccattcttcataacgtcccgcttcaacttcacgaggatcatattttggtttcatttccatttgctatacctcctaaaaaaataaaaatatccatcctatatacaaataggacggatattccgtggtaccacctatattcaagaaggatgattaatatcaaattcactcttttaacataattggaataatcataccaatactatcatcgtgaaatttgaaatgcttcatctcttcaagcactctagattatgattaacgctcaaacacgtcttagcctactattaatcacgttcagctaagatactctgtgggctaccttcagtaaaaatcatttacatactcacaccaaatcatatgctctctttaaaataatttgaacttactcttcccaaatcctatattaaactcttaacttatagtataatgattgacaaaataagtcaatgtataggtgggaataaaatgaatgaatgcgcatttggtactaaagatccagtctacttagactatcatgatcatgtatggggacaaccgctctatgatagcaaggcattgtttaaacttttagcattagaatcacaacatgctgggctatcttggttaactattttaaaaaagaaagaagcctatgaagaagcattttatgatttcgaaccagaaaaggtagcacaaatgaccgctcaagatatcgaccgcttaatgacttttccaaatatcgttcatcatcgtaaaaaattagaagcaattgttaatcaagctcaagggtatttaaaaattgaacaagcatatggtagttttagtaaatttttatggtcatatgtaaatggtaagcctaaagatttgcagtatgaacatgcttctgatcgtatcacagttgatgatactgcaacacaactatctaaagatttaaaacaatacgggtttaaatttttaggtccagtaacagtattttcgtttttagaagcagccggtttatatgatgcacatttacaagattgtccatcaaagcctaaacataattaatttgctatagcatcataaagtaaacgagacatcatctatttttaactaatagactgtctcgttttttaatgtgaaaatttattcaaatcataagttaaagttccaagttaatgctctgctaatattagatatcttaatctaaaaatagatgtacaacctttgcttaaaccttaataatgaattctatcctaagcataattcaacttagatggatgatagtttctaatcttcacgcttattcgaacgatattttaaaaagtaattaattcctggtgcaataataaataggatgaaaaagattcggaaaatatgataactcgtaatcatagcaacatcggcaccagtagctaatgcaactaaaactatctgattaacccctcctggtgctgcaccaagaaacaattcattaataggattattatcaaagaaatgtatgatataaaccatgattagcgcaccaattatcaacataatattttgaattgtaattgcgattgctagtctaccttttaaatctgacaataaatgcgcaatttgaactccaattctaatcatatatattagttgtgccatgttcaacaaccaatgatctagtgtaaatgttaaacctgtagaaaaattccaaacaattaatacaatgagtggtgctaataattgaaatgttggaaactttattttagacataattagataaactataaagatagctatcgctaaaataactatttgccctatgtttaatacttgtgataaaggcaagacttttgttaactttccattcgcatgcatgttaccatcatgaaaaaaatatgaaatgaacggtactaaaacaacaacaaatataattcgtgatgtttgcgttaagctaacaactaacaaattagcacgtttgtcttgttcagccatgaccagcatttgtgttagtgctcctggtataacacttaaaatagctgtttctgtattaatacgtgcaatttttttaaaaacaaatgccattactattgcaattaataatatcgaaatagatacaacaataatcgaaagccaattgtttttaatatccataacgacatttttcgtaaacgttgatccgatttgcacacctaatagtacaatacctaattcactaagtaagaatggccatttaatatcaagtttgaaaacttttacacaaatgattgatgcgataataggaccaaacataaatggaagtaatacgtgcgatgaatacagtagaatactaataaaaaatgataaaacgaacacaatgaaattatttctatatatcattgccatgttttccacttctttcaataaaaaataaaatgactaaattgctgcttgagcttcacgtttgttaagataacaatatccgctagcagttttgactacaaagcatatatggactttcactatcaagtcgccgcccatgccttatatacatttaaaaagagcctgaacaaagttcaggctctcaatttgtccgtatatttattttacaatacgacttaaagccgtatcaaatgcttgaatcgttttttcaatatcttctttcgtgtgtgccgtagataagaatgtaccttcaaattgagatggtggtaaaaacacaccttcttttgccatttctcgatacatttctgcaaataatttcaaatcacttttattcgcttgttcaaaattagttacaggtccttcatttaagaaataaccaatcattgaacctgctctatttacagttattggtacattgtgtttagcaaatacacgttttaaaccgtcttcaagtatatcgcctaacatattaaaatactcatatgtctctggcgttaattggcttaacgtttcataaccacttgtcattgcaagaggatttcctgataacgtacccgcttgataaatatttcctaatggtgctatatgatccatgatttcttttttaccaccaaatgcacctacaggtagtcctccaccgataacttttcctaagcaagttaaatctggtgtcacaccaaagtaaccttgtgcacaatgataaccgactctgaaaccagtcattacttcatcgaaaattagcaatgcgccgtattcagtcgtaatatctcttaatccctgtaaaaaaccttcaatcggcggtacgacacccatattaccagcaacaggttctacgattacaccagcaatatcgtttccaaatttttcgaaagcgattttaagtgcatctaaatcattgtatggaactgtaattgtatttttagcaataccttcaggcacaccaggagaatccggcaatcctaatgttgccaccccagaaccagctttgattaataacgaatcactatgaccatgatagcaaccttcaaatttcacaattttatttctgccagtataaccacgtgctaatcttaaagtatccaatgtagcttctgtaccagatgacaccatacgcactttttctattgaaggtactcggtcaataacgagctgcgccaatttattttcaagtaatgttgatgcaccaaaacttgtacctttatcaattgcttcatgtaaatgactaataacttgagggtctctatgtcctaaaataagtggtccccaacttagtacatagtcgatatactcgttaccatcgatatcataaatttttgaacctttaccgtgatccataaaaattgctggtgtatctactgatttaaatgcgcgtactggactatttacaccaccaggcattaaagtttcagcaaccttcattgcttcttctgatttcgtatatctcataaagtaaattcctcctacagtttatggaaaatcataaatataaaaccttatttatctaaatagcgacaaatgtcctttgcaaaatacgtaataatcatatcagcacctgcacgtttcattgaaaccatttgttccataacgacacgttcttcatctatccaaccattttgtgccgctgctttagtcatactatattctccactcacattatatgcaacaactggaacattcgtatgatttttaacatctcgaactatatctaaataacttagagcaggtttaacaatcatcatgtcgcacccttctttaagatcactttctaattcacgaagtgcttccaaacggttagcagggtccatctgatacgtttttctatccccaaatgatggcgctgaatctgctgcatctctaaaaggtccaaagaaacttgatgcatacttgacaccataactcattataggaatattgtaatagccggcttcatctaatccacgacgaatttcagcaacaaaaccatccatcatattacttggcgcaataatatcagcaccagcttccacttgagaaattgctgttttaacaagtagtggcaatgatttatcattgtcaacgtcatgtgtatggtcatcaatcacgccacaatgaccatgatcagtatattcacataaacaagtgtctgcaacaattaataagtcatcatacatttttttagcaatacgtgttgcctgttgaataacaccatcgtgaatgtatgcaccagtacctatatcatcttttgagtttggaacaccgaaaaacataatggcacgtatgcctaagtcataagcttcttttaattcactttcaagtaaattcaaactgatttggtatacacctggcaatgacttaatttcttttttcacatcgtctttttcaactacaaaaattggatatattaaatcttcttttcttacatgattctctctaaccatatctctcattgtcgctgatgatctcaatcttctatgtctatcaaatttcatttttagcccctactttctaaaatcttttcaattagtgattcgagtgtttgaatttctgcaattgttactggttgttgatatgatttaatggtccgtgctgtttgttctccaatagcaaaatacgacttgaattttggtacaaatccttcattaaaataataacgtactgccgacgaacttgaaaatgttaatgcatcgatttgttgatgttctatcatttctttaacatcttgtatattttgtttgttaggcactgaagtatataaatctattttaacaacttcattatctttagataacgctgctaataacaatggtctcgccaattcactcgaaggcaaaagtattttttggttagtttgattaaatgattttaaaaatccttcttgagaaaagtcgtttggcataaaatcaactcgaatgccaagtgattcacaatattgcgctgtcttacttcctatcacagcaatgttatcaacattaattccttttagatatttataaaagaatttcacagcatttttagatgaaaaaataagccagtcatagcgttgatttaacaaatgaatatcaaaatttagtggctttatatcaataaagggtttgtgaataattgatactaaatcactttgcatgtcatttgtttgtgtcataactacaactggcttcatatttaaacgtcactccattatttaatgttgttcatttaagcgttttataatttcataagcaccttgctcttttaatttgttactcactgttttgcctaactcaaccggatctgttccgttcattgtatattcaaatcgttctttaccatctggggtcataattaaacctgtaaattcgatttcgttttgatctgagattgtagcatatcctgcaattggcacctgacaactaccatccatttctgctaaaaacgttcgttcagcagtcacacattttgcaacctcatcattatgtactttgcttaataatgttaatagttcttcatcgtcactacgacattctatccctaaagcaccttgtccgattgcaggtaacaatgtatctctatcaagataagatgttacaatatcatctgaccagcccattcttcttaaaccagctgcagctaaaataatcgcatcataatcttcagtttgtaacttttctaatcgtgtatctatattacctctaatccatttaatctctaaattaggatacttagataatatttgtgcaccacgacgtaatgaactagtaccaataatactgccttctggcaattgggatagtggtgtatgtgttttagaaatatacgcatcaaaaggtaattctctatcagggatacaacctaatgttaaaccttccggaattacacttggtacgtctttaagcgagtgtattgccatatcgatatttttttcaaaaagttcatgttgtatttctttaacaaataagcctttgcctccgactttagacaattgtttatctactatacgatcgcctttcgtgacaatttctttaatttcaatttctagatttggctcgacagcttttaatttatcaataaattgctggctttgtgttaaagctaatttacttcttctggagccaacgactaatttacgcatgttcaattcctcctaggaacggattgctctagattattttctcaattcacaaaatgtgttgcaaaaaataaattaatcatatttaagcaaaataaaataatgttatagtatattaaatatcttgaattcaaccatttgttgattctaagtaaaatataacttccatataatactgtaataattgaagagagtattaccttcgggtcaatgaatatacgttcaccaactgaaattacaccccactgtgtacctaaaataatactaaatatgagaattatccacccacttaacgttgagtaaaacacaattgattcaagtgtagcaacgctaccaattctaaagtatttttgatcaaaacgtttttccttcaaattacggtattgcatgatatacagtaatgcattgacaaaagctaaggcaaagaagacataacttaacacagctagaccgatatggactaacagtaactcgtctacaacagcaattttctgaaccttattagtataatgtgtcggttgaaatgtattcatccctaaaagtgttaaccctattaaattcaagaaaaacacagagaaattcaaaactttgataaggttaagaattaaagagattgaaataatcagccaacttaaagtatagaatacatctgaaatagaccctaatggaatatgtctagtttgtataataaaaatagataaagagattgtttgtaaaacccaaacaatccccaataaatatatgcctaaacttctaatcttatgacttttttgtacaaaatcataaaaatagcaaatgatactgattaagtatattaataatataatttcattgaatcgaataaacaggttttcttgcatattatcaccatattaatatgcttattcaaaactaaagatacgtcgcgctgaaatttccttgaccttgctttctttttgttgcttcgcttgctcatgaggacattcagcttcgatatcaaatatattttgaaatagctctaatttttcattacttttcttatcactacttaattctttggcctgtttaataggatctttcaacatttgattgatgatactttttgtatgtttagatataattttacgttctctttcgcttaaccctggcaatttacgatcaatactgtccatcgtttctgcttgaattgccatagctttttcacgtaaagctctaatcactggaacaacacccaacatactaatccactcattgtgtgcatgtatttctgtaggaatttgttccgaaattgttgcagccgctaattgtcgctcacgtaagtttgcatcaactaaaccttttaagtcatcaacatcataattaaagatgtttgtgatggcactaataccaggttcaatatctcgaggaactgcaatatcaatcaatactagtgaatcttgctttctattttctgcaattctttctatcatttcatttgtaatgatataagattgtgcactcgttgaactaatcacaatatctgcactttcaagtaaatttggtaatgatgatagttcatcatatttcacttgatgctttgctgctaatttcatagcattttcaattgttctatttactactgtaatatcagtaattccagaaccaagaagatttaatagtgataattcactcatttcccctgcaccaataatgatagcttgcttacttttcaatttgccaaatacttttttcgccaactcgaccgcagcataagacacacttacagcattatcagctatatctgtttcattatgtgctctttttgcaaaagtaattgcctgtttaaatagatgattaaaaattgttcctgtcgtacctgtgctttgcgctaagaaaaatgcatctcttatttgacctaaaatttgagtttctccaagtacgattgaatctaaaccagaagtgacacgcaataaatgttctactgcttcgtcccccacttttacttctgacattgctttaatatcatctacttcaaatccaaatgcacgagctagaaatcgttgaatatagtaacgacctgtgtgaatttgatcaacaacagcatatacttcagttcgattacatgttgataatatgacattttctaaaatagatttagtttcatataaatcttcatgggcaattcgtaaggcatcatctctaaaagtaacttgctctcttagtgcaacatcagctgtgcgatgatttatactaattgcaataaaatgcatttgaaacgcccccatatatactaacaatacaaatattataacataatttaaaatccaattaagtacgatgcttaaataaattataatctttctaatttacttttgagtttttgacaaaatgatgaacgttgaaaaatgttatcaattgtgtactaattaaaagtttcgtgcttacattatttttaaaatttttgtataagttttgacgtacaaaaactatgaaatatacggttcaattaaattccatatttgttgttgtttattattttgaattgatgaataacttacaattgtatcgtctgggtccatatctaattgtgtcttaatatttttaatatgcttttgaaccttaccttttggaattttgtcttctttagtgcatataactaaagtaggaatatcaaaatgtttcaaataattgtacattaagatatcatcttgtgttggatcatgtcttaaatcaactaattgaataactaattgcaaattctctctcttagttatatattcctcaatcattttcccaaatttttcacgttgtgttttacttactttagcatatccataccctggaacatccacaaaaataagttgttcatctatattataaaaatttaacgtttgcgttttgccgggttgctgtgatgtacgtgccatattttttctgccaatcatactattgataaatgtagacttacctacattagatcgaccgctcagtgcaacttcagacaattctgtttctggatattgttcttcttttactgcactaatgattaattctatattattaggattaactttcattttatatcctcacttttttatattctctttcaattctaccattatataatatttgaacctttcggtatacattataaaaaagctccgatcaaagttaaactatttgagcgtcaactttgattggagcttttcacttttataacacatcaatgattaagctgatgttttactattattaattaaattgccttctgcgtcgtatagttctggttcagtttcttcattaattgtttgtgctgtaataactaccttcgttacattttcgttagaaggcacatcaaacataatatcgattaacgattcttctatgattgaacgtaaaccacgcgcacctgtttttctttcaattgctttttcactaattgctgataaagcttcttcagtgaactctaaatccacatcatctaattccagcattttagtatattgtttcacaagtgcatttttaggttgcgttaagatgtttttcaacgcagttacatctaatgtttctaaattagctacaattggcacacgtccgataaattcaggaatcaaaccataggcttgcaaatcttctgggcgaatttgtgctaataatgcttgttcgtcatatttatcagcttcattgcttgagaaaccaataactttttcaccaagacggcgcttaatcacttcttcaataccatcaaaggcaccaccaagaataaataagatatttgttgtatcaatttgaatcatttcttggtttggatgtttgcgtccaccttgtggcggaacacttgcagtcgtaccttctaagattttaagcaatgcttgttgaacaccttcacctgaaacgtcacgtgttatagatgtgttttcagatttacgtgcaattttatcaatttcatctacataaataatacctttttcggctttatcaatgtcaaagtcagctgcttgaattaatctcaacaagatattttcaacatcatcgcctacataaccagcttcagttaaacttgtcgcatctgcaattgcaaatggtacattcaacgtcttggctaaggtttgagctaataatgttttaccactacctgttggcccaattaatgcaatgttacttttttgtaattcaacatcatcttcttttggtcctaattgttgaatacgcttatagtggttataaacagctacagctaaagattttttagctttttcttgaccaataacatattcgtttaaatgatccataatttctttaggagtaggtaattctgtcatcgcttcagaagtgttttgagctaattcttcttcgacgatttctgagcataattcaatacactcattacaaatatatacacctcttcctgctacaagtttttttacttgatcttggtcttttccgcagaaagagcatttcaaattttcttcatcttcattgaatttaaacattctttttacacccctattcgttaaagactatactagattggatgttacaatgcaacatattaacatacaaactttttgcttaaagaatagtagcagatacataagctatgcatctgctactcatttttgtaatttaatatttaatgaagattaatcttctttagttccttcaacgaactttgcgttatctcttaataaatcgataactttttggatacgaacatcatttttaatgatatcagtattacctaaagtatttttgatatcttcaactgagatattaaattgtttactcattttttctaattctttatcgatatcttcatcagtagcttcgattttttcagcttcagcgatcgcagttaaagttaagttagttttaacacgttgttctgcatcgtctttcatttgctctcttaattgagtttcatcttgacctgagatttggaagtacgtttgtaaatctaaaccttgttgttgaattctttgtgcaaattcagacaccatacgatctaattcagtattaaccattgcttcaggaatatcgattgttgtattatcagtagcttttgtaatcgcttcttctttttcaacattttcagcatctgtagctttttgttcagctaaacgtttacgtaagttttctttgtactcgtctactgtatttgcttctgcatctaattcattagcaatttcatctgttaattctgggacttctttaaatttaatttcgttaacttttgttttgaaagttgcttctttaccggctaattcttcagcatggtattcttctgggaatgttacgacaacatctttttcttcgtcaactttcataccttctaattgctcttcgaaaccaggtatgaatgaacctgaaccgatttctaaatcgtaaccttcagcttgtccaccttcgaattcttctccgtcaactgaaccactaaagtcgatgttaactgtgtcgccattttcaacaacaccatcttctttaacgaccatttcagctaaatgtcctaagctgtggtcaatcgcttcttgtaactcatcatcagataattcagtttcttgtttttcaatttcaagacctttatagtctcctaatttaacttctggctcaactgtaactgttgcttcaaaaatgaaatctttacctttttcaatttgagtaacacttacttctggttgtgcaactggtttaatatcagtttcgtcaattgcttcaccataagcatctggtaataaaatgtcgatagcatcttgatataatgcttctacaccaaagcgttgttcaaaaattggacgtggcactttacctttacggaatccaggtacgttaatttgtttaaccacttttttgaatgcttgatctaacgctttgtttactttttctgcaggaacagtaacagttaataaaccttcgttaccttcctttttttcccaagttgctgtcatgtatatatacctccatgattaactaatttattttttcaacttccctattatatcatacgtctattccctatacaaacattgaaatcacaacgtttatatatttgtaaatcaacttttttcgtcaaaactatattaaaatgctgagtattattttgcaacaatttaactattattattcaaatctaattgctgaataaaattaaatgcatcgatactttgtaattcacatttaagtcctaacatatttttgaaataacattcgtatgcattaatccatttattcgtttcaaacaaagtttcaatatcaattggataaatcatgatagagtgattattcataatatggtgtgcttcttcagcgatatgtaaagcaccatcatttaatgtttccataacgttaggtataactttttctttaagtgttgtatgttctagcccttttaaattagctggtacaaaagttacatccataccatacttttcaattgtcagttcttgtgtacaatttgcgaaccttaaatactcaatcattaaactaatgaggttataactgtacgtattagattttaatatatataataccgtttcttgaaattgaaaatgaccattgtctattaacttcaaaatcaagtgcgtctgttccctcattgataacgtatcaaaatcagctaatgactgagtcaatcgtttttcatcttcaattaattttgacttagcaaattctttaagaggatgtaatgccattcttgttttgtgatctttgacttcatcaataatttgatgaattacttctaccgcttcaaaatattgtcccaaaccaatcaaacttttcacgtaataaatcatcaatgcatcatattgttgtatgccagttttcaataagacaattgtttcttctcttaattcaagaaatgaccccgtctcatataacatacggcatttcatcattgctatttcttcagtgagttcaaattgacgttcatattgcacaatatattcatacatcaggtcatagttttggtcttgttcagcacgttttatatctttatataactttttcgaagagttaggaaactgaataatatctgacatatatgtcacctcgtttgattataaatcttgaaggattaatgcactccacgtttcgaaatcatcatatgactctatgttgcctttttcaacccattttattcgtaaagtatctgtttctttagcttctacatcattcgtacttacagtgattttaaatacaacaccaatatgtaccttgcccacttcattattatcgtcattaataaaaccgatatattccatattttgtgaatcttgctcacttaaacctacttcttcttctaattctctctgtgcattaactctcaatacttcgttaatagattctgctcctggaacatcattcatatgaccgcctacacctattgaagattgtccatgcaatcgagcttctccaccgccagataatcgttcatacactaatatctcgccatgctcattttcaagtaaacaataagaaatgagttgtttatatgatggatcctcttccatatcgccgcgtcgcttaacttcatattgacttagcgcatcaaaaatattttgaccttctggtttattcttatttaaaaacccattgaaagtattcttttcattattaaaaataatttctctaggtactacaatgatttgttcatcaaatttagacatcgtataaaactcctcactttaatgtttgttctcttaaatgcattttagcaaatatgtcatattttagcgattaaatgtggcattttgctatttaaaaaataaaaaagagatgacaatgccatctcttttttataagtgttattattttaaagcatctttagctttagttactaattgagcaaatgctttttcgtcagaaattgcgatttctgataacattttacggttaatgtcgataccagcttttttcaaaccgttcattaaacgtgagtagctcatttcatgttgacgagctgctgcgttgatacgtgtaatccataatttacggaagtcacgtttacgttgacgacggtcacggaaagcatattgacctgatttcattacttgttgcttagctactttgtataatgtatgttttgaaccgaagtaacctttagctaatttaatcgtttttttacgacgcgctcttgttactgttccacctttaactcgtggcataaaaaattcctccttaggtaattcctaccgatttctgtatttgttcttattttttgtatgctaataattgttttacacgtttcatatcgctcttagacactaatctagctttacgtaattgacgtttttgtttagtgctcttgtttgcgaataagtgagatgtgaaagctcttgaacgttttaattgacctgaagcagttcttttaacacgtttagctgctccgcggtgagttttcatttttggcataatataagtcctcctgtaatagctttaattatttttcagctgttggcgctaacatgataaacatttgacgcccgtccattttaggtttttgttcaactgttgctatatctttgcattcatctgcatatttttctagcacacgttgaccaatttccttatgcgtaatggcacgccctctgaaacgaatagatactttacatttatcgcctttagttaagaatttacgtccgtttttcaacttcgtttggaaatcatgttcctcaattgttggacttaaacgaatttctttaacattgataattttttgtttctttttcatttctttttcttttttctgttgttcgaatttgaatttaccgtaatccataattcttgcaactggtggtttcgcattcggtgcaacgaccactaagtctaaatctacacgttcagccatttctaaagcttcacgctttgatttaacaccaatttgttcaccatcttgaccgattaaacgtaattcttttgcacgaattttgtcattgatttgagtttgatcttttgctatggttgacacctccaaaatttttacgaaatttgcaccaagcaaaaaggaagagcaggtataaaatacccgctcttccttatacacagttatgtgtaatgtgattaacctgccaactgctttatgcgtcgctacaggtgagaagcgggtgcttctacttggttcgtttcgtattcaacgttattaatcatatcaacaattcacatttaagtcaacactataactgtaattatttttattttaaccttttatttcatccattgacacgtcttgacgtaaatctacttgttctaatggaatttttttcgttttatatcgaagcttatgataaataaagaatgctaaaaatactggaattcccatatacgtaattaagaagcgactaaaattaaaatctcctgttttaataaagtcaacatcttgaccaataattactacaatacataaaaagccagcaaataatggtccgaatgggaataatttagcagtatattttaatttagatttgtcataattttgtttatcaaatgctcttctaaatcgataatgacttactgctatacctacccaagcaataaaaccagttaaaccacttgctgcaacgatatattcgtatgcaccttttgtaaggctttgtaatacgaaaattatcactacaatgattgctgtaacgagtaacgacatatatggcacaccgtttttatttgttttaccaaatgcttcaaacgctaatttatctttactcattgaatatagcattcgagttgaagcatacatacctgagttacctgctgataacacagacgttaaaatgactgcattcataaatgatgctgcaaacgcaaatccagcatttttaaacactaatgtgaatggagacgttgctacattatcactaccccccattaatgcactactatcataaggaattaacataccgataacaaaaatggctaaaatgtaaaataataaaattctccagaatacttgtttaattgctttcggcacagcacgttcaggattttctgattcaccagccgtaataccaattaactcagtaccttggaatgagaaaccagcgattaagaatacacctagaattgataacaaacttcctcctaagttgccaccaagaattggaccttcacctttattaaatatttcgaatcctacaacatgaccacccatgattccgacaatcgttaataaaccaattgcaacgaaaacaataactgtaaccacttttatcaatgccaaccagtattcactttcaccatagacgcgaactgataacgaattcagactaaaaattataactaagaacaacgcactccatgcccaagcgggtatgccttgcaatggtgtccaatattgaatgacttgtgctgcaatcgtaatatctgctgctacagtcactacccagttaaaccaatagttccaaccaagcgcaaaccctaaagatggatcaacaaatcttgtagcatatgtactaaatgaacctgatactggcaaatacgtagccatttcgccaagtgacgtcattaagaaaaataccattattccgataattgcgtatcctattaatgcacccaaagcacctgcatcatgaattgctccaccagaagttacaaataaacctgtaccaatacaacccccaatcgcaatcatagaaatatgacgatctttaagtccccttttgacaacattgttactttcattttgaacttttgacatataagctccctttccatgttttagaggccaagaaataaataacctttattcactttcatacccttttttacagaacatagtgatattaaaagtaaaaaagtggctacatacctttaagatatgcaaccactttggcaattatctatataaggtagcacatcacattctgtgacagtacagttcctattcgaaaactgtcccaatagatataatttatggtttatatctatttcggcatctttacctttcacttgttcaacttatgtaccataaatacttctgacaagttactaattaaacatgcaacctctaactcaatttaatattttaactaacttgtaatatacaggattcatcacgcataatcaaccctgtaaaacttgatacgcaataaaagttttaaagcattttattgcgacaactgtctatctatgttttttcaaacgaatttcatcaactagattccagataaattcatctttttcaactgtttcttggtcttgcgatccatattgacgcacattcacttgattattttcaacttccttatccccaactacgatttgataaggtattttttgcatttgagcttctctgattttataacccattttttcattacggtcatcaatacttacacgaacgccttgagatttcaattcatcttgtaattggcgcgcataatcataatgtaaatcaacgttaactggaatgatttgaacttgttttggcgctaaccaagttgggaatgcacctttagtttcttcagttaaaaatgctacaaatcgttccattgttgatacaacaccacgatgaataacaactggacgatgatgttcaccatcttgaccaatataagttaaatcaaaacgttctggtaataagaaatcaagttgtgctgttgataatgtctcttctttacccatcgctgttttaacttgaacatctagtttcggaccatagaatgccgcttcaccaatcgcttcttcgtacgataagccaagctcatccgctgcctctttaagcatattttcagctttattccacatatcatcatcatcaaagtacttttctttatcttcagggtctctataacttaatctaaagctataatcctcgaaaccaaagtctttatacacatcaataatcatgtttacaacgcgtttgaattcttctttaatttgatcaggtcgaacaaagatatgtgaatcatttaaagtcataccacgaacacgttgtaatcctgatacagcaccacttgcttcatatctatgcatcgttcctagctcagcgatacggataggtaattcacgatatgaatgtggtttattcgcataaatcatcatatgatgtggacagttcattggacgtaataccatagattcagtttcatctaactgcattggtgggaacatatcttcttgatagtgatcccagtgaccagatgttttgtataaatcaacattagcaagtactggtgtataaacgtggtcatatcccatgctaacttctttatcaacaatgtaacgttcaatttcacgtctaattgttgcaccgttaggtaaccataatggcaaaccagcaccaactaattggctatttgtgaatagttctaactctttaccaattttacgatgatcacgttctttacgctcttctaacatttgtaaatgtgctttcaattcttttttatcaaagaaagcagtaccgtatatacgttgtaacattttgttgttactatctccacgccagtatgcacctgctgtagataatagtttaaactctttaattttagctgttgatggaacgtgaactccacgacataaatcagtaaaatcaccttgactatataatgttacattttcatcttcaggaatcgcgtcgattaattctaatttgtattcatcattgctgaataactctttcacttcatctcgtgaaaccacttttcgttcgattttcatattttcgttaacgatttgtttcattgttttttcaatttgttcaaagtcatcagatgagatgttttggtcaatgtcgaagtcatagtagaatccaccttctattacaggacctacaccaaatttaacattaccatataaccttttaatcgcgtgtgccattaaatgtgcagtagaatgacgtaatacctctaacgcttcttcactacctggtgtcacaatttcaattgatccatcagtttcaagcggtttagttaaatctacaagttgcccgttaaatttgccggcaacagcttttttacgtaatccaggactaattgattgtgctatatcttcagtagtagtacctttatcaaacgcctttttattaccatctggaaattgaatattaatttgttccatgttaaaccctcctatttgctttataaatacttttatctgacctcgttaaaaaattgaacaacaatcatcgttttaacattaaacctattaacaataaacagggaatttatgacaccaacaaacatttatgtctgaaaaaaacaaaaaatcccgcccctatacaagggacgagatcgtcgtggtaccaccctagttatctaatacaatttatgtattaaatatctctgcttaagataacggtcttgatccgggtattcattacaaataccataaatgaagtagtaatcatctaatttattaaccatattctcatcaaacaatggctttctgtgtaatattgattagatcatcttgtcttcaatcatttaaacgatttagatttgtattcattatacaccaatcattttaaaattcaattgtttctgaaattttctcctgataaaaagtatggtgttgacaaagatttgacacgttcaataatacgtgctgctttagtcttctcttcaccatcacgagtcatcgctaaatgatgttccaattcactatagtcaaaattagaactaaagaatgttggtaattcatgaaccattcgataatgtagcaaaggtccaattacctcatctctcacccatggagtcacttcttcagccccaatatcatcaagcattaaaatgtttgcttctcttacgcgatgtaatttcttttcaaaagaaccatctttaaagccaccttttaatgttctaataaattccggtaaataaataattgtcgaacgtaccttcttagatttgagctgattcgcaattgcacctagaataaaagatttacctgtcccaaatggaccataaaggtaaaggcctttcacttgttccccattagttattgctgtacaaatatcatctgctgccatagctacatcaagacggtctcgatgattcatataaatatctttcaatttggcatttaaagtatctcgttgcatatgatgagatgtaattagctcagcttcaaagcgttcttcgtcgtacttgattttacatgggcattgtaaatagcgtattttaattcggttattatcaacatataactcaggcacatgcccctttacgaaatttggacaatcagcaaatttatgaccgtcataatgtttttgttgatctttatactcttgtaacacatttaagtcttcatcaatcatagcattcgttaattcagctcgatgcgcttccaaaaattgcttaacatctgggtcattgattacttctttttttatcttttctattcttttttcaaagtcctgcgacgtgttaattatacttttaaattgcttcattattgactgtcctcctcccattttttagataatttatctagaaatgcttgtcgatcttgctctaattgttgatcatctacgctattatctttagccgaatcttcttcactaggtttatctctattttctaaccatttaggtgttttttcttttgaaatacgattacgctgcccatagtatgaaccacgcttttggtaatttccgctagaaccctcatttttaggttgattaacttttttagcgtaattatatgcttctttagctgtcttaataccttttttcttccaatttgatgctatttccaaaatatacgctttaggaagtttcatatcttcttttaacatgacaaattgcaacaaaatattaatgacgccaaaagacattttttcacgttcaattaattcttcaaccattgtcttttgcgatatagttggttctgattcagaccaagaagctaacatatcaattggactcgtttgttcaagtaactcaaaccattcatcactttgtggctttggattcacttctgaagatttgcccgccgaagatgatgtagcaggagatttcacctgtaatttaggcatttgattttcgtgttccattaagtaatacgagcgtgcttgtttacgcatttcttcaaaggataactgttgtccacttgtaattgaatttaaaataacatgcttcatgccatctgctgttaaaccatataaagtcgcgagttgtgtaattaaacgctttgcatctttggtaacaatgtcttgactaataaaatgtttacctaacatttgtctcaacatttcaaagtcaaaagattcatttgataaatcgataccttggtacggttcattaatcggaatatcacttgtatcgatatctatttttgtagacggcactttaaaaacatcagtaaattgtcttgttacctgtttaaattcactcaaatcaatttgttgatactcaaagtatttcttcaactcatgaaatcgacgatgctcgacttcactatataaaaagattgacaacattggatcattaaaaaataaatgtgctgaaggcggttgaattaattggtaaacaaattgtgtttcttgttcatcatgtttgacaaacgcctttaacaatccaatcgcttcaagtaagtccatttgttgtctaaactctagtaaattaattttaagttcattcataaaaatataatgagaaagaatcaatgtttcattatgactttctttaacgaattgagtcataaaatgatataaacccactgcttgcgttccaattagcggtgtatacagtcgattcaatacctctaaatgattcgtatttaaatcaaagtgttgcataactttgaattgatcctttggtcttaagccgaattcgaaggcttgtcgtcccatttaagcatcactccgtttgttttcgcttaaaatcccttgcatcgatgctaacaattgatcaacatctttaaattctttatagactgatgcaaatctaacatatgaaacttgatcaacatgcattaacaagttcataacgtgttcacctatatctcgtgaagacacttccgtatgaccttcatctcgtaattgccattcaaccttgttagttatgtcttcaagttgttgatatctaactggtcgtttctcacaagaacgcacaagtccattaagtatcttttctcttgaaaactgctctcttgtgccatcttttttcacaactataagctgactaacttcgatatgttcaaatgtagtgaaacgtgttccacaattttcacattctcttcgtcttcgaatggcatttaattcatcggcatgccttgaatctacaactttagattgtgtagaattacatttcgggcatttcattacatcaccctctttattttgattatgcctaattatactataaatctagagatgaaaaaagaatccctcaatttaattcatttaaccaaataatgaaacaataaaaaacattatatcgttacttattaagtaatttgcatgacaatattattgtattaaaaataaaaaacctaactccgaagtcagagttaggctataaattaattgtattaacttgcacttacagtttcttttgatgtcaaaagtgctccaatttgctcagcaacatctacaactctatttgaataaccccattcattatcataccaagcaataacttttactttattccctgacatgaccattgttgattttgcatcaataatagctgaatttggattagtattaaaatcaacagacactagtggttgatgttcgacttctatgataccttctaaacctgcattttcaaaagcttggtttacttcttctgcagttacttctttttctaaatcaacaactaaatcaacgagcgatacattctttgttggtacacgtaatgccatgccgtgtaatttaccttctaattctggtaatacttcttttaaagctttcgccgcaccagtagaagtaggaataatgctttcattacatgaacgtgcacgtcttaaatctttatgtggattatcaatatttttttggtcatttgtaatagcgtgaacagtagtcattaaaccattaactattccaaactgattatttaaaacttttgcaactggaccaatgcaattagtagtacatgaagcattactaaaaatgtcaaatgcttctatatctaattggttatcatttacgcctttaactaccatttgaacatgtccaccttttgaaggaccagttaacaaaacttttttggcacctgctttaatatgtgcgatggctttatcaccatgattaaatttaccagttgcatctatagcaatatcgatatctaattctttccatggcaagttttcaggattgcgatcagcaaccaatttaattttatgatctccaacttgcaatccattttcaatcggttcaacttttagattatattttccatgtgtcgtatcgtaattgattaaatgtgcaattgtttcgggtggataactagcatttatcgctactacatttaaatttttattttgtaatgcaatacgtaataccattcttccaattctacccataccattaattgcaatattcgttgacattaaaagcaccccttgatctttatgtgttatactttatggaattagtatagcatattatatgaaatttgaaagcgttttccgttgatttatttatcttttttataaaaaatagtcattacttacatacatcaacgcgtacgtaaagtaatgacttatttatagtgtaatattaatcttcttctccgtaattcggcttttcaatataaccttcttcttctaacaatctctcaaggttttgttttaattcaagtttatcccctaaattatcgataacatgatcggccattcggctttttttatcaatagaaatttggctatagacacgtgctttcgcatcttctaatgacaaattattacgttgcattaaacgatccatttgtatactttcagaagtgtatacaacccacacttcgtctactgcattttccaattcattttcaaataataatggaatatccatgattacattatatccttgttttaaatattcttgcttttcttcttccataatatctcgcacgataggatgtatgatagcatttaattctaagcgtttttctggatgattaaacactagatcacccatataacgacgattcatctcaccattttcatcaattgcttcatcaccaaagacttctcgtacttgagctaaacctttactcccctttttaacagcttccctggctgctttatcagcatctactactttaaaaccgaatacggataagagttctgatactgttgattttcctgaggcgattccacctgttagaccaataactttcggcataatttcactctttctttatttttgacatactggacaataatgactatttcttgtcgcgatgatttttgtttcaatttgacttccacacactttgcataccggctgcttatatacattaagatgcaattgcatctcaccagtttttccatcagcatgacgataatctgaaatacttgtaccgccatatttaataccttcttctagtacttctctaacataataaaaaaccatttcttgttgttggtgtgttaagtcttttacttttttatctggtaaaacacctgcacgaaacaacgcttcacatgcgtaaatatttccacaacctgcgattactttatgatccaaaatcacttgtttgattggtttattcttattagactgttgatgaattcgatttaaataatacgtcaatgcttcatttgaaaaaggttcaggcgctatttctaaaaatgaaggataagatgctacagacgcaacatttctaatttctccaaaacgacgtatatctgaataaattaactttttgtcatttgacaactcaaaaataacatgccaatgcttacgataattaggtatcataatatcttcaagttcatctacaatgaaaaaaccgcccgccatacctaaatgactaattaatgtacgttgttctcgtttattatctagctgaaaaacgatatatttacttcttcgttctacatttgtaatggtatagccttccgataaagttttaaaagtatctaattcaattccttttataattgtttccttgccttgagctttaccttcgattactttatccgaaaatataacgtgttcaattttttgatttataacgtagggttcaattcctctttttacatgttctacttctggtaattcgggcataccattaacctcactttattttgcatcataccaggttgcaccataacttgagtctacttttaatggaacatctaattgcaatgcattttccattatctcttctacaaattcactaaatgaatctacttctgacttaggtacttcaaaaattaattcatcgtgtacttgtaataatagtttagcttgatatgttgtctctttcattttttgagcaaatttaaccattgccagtttaatgatatctgcagcactgccctgtattggcgtattcatagcagtacgttcagcaaagccgcgtaaattaaagttacgactcgtaatatcaggaatatagcgtcgacgatgtagcaatgtttccacgtaacctaaagctttggcatcttttacaatatcagacatatattgttttacacctgggaaactagctaaataatcatcaatgaatgcttttgcttttttacgagtaatacctaaactttgacttaaaccataatcacttatcccataaacaattccaaagttaactgcttttgcttgacgacgcattaaactatcgacttgatcagcttctacaccaaatactttcatagcagttgctgtatgaatatcatcgccgttgataaatgcttctttcatactctcatcttgtgtaatgtgtgctaatacacgcaattcaatttgagaataatctgctgataatataacgctatcttttgaagttggtttaaaggcttttcttattttacgcccttcttcaagtctaaccggaatattttgtaaattaggatctacacttgataaacgtccagtttgcgctaaagtttgattaaaacgtgtatggatacgttgatcatcactaattaccttttgcaatccttcaacataagtagactgtaacttagataattgacgatattctaaaatataatcaatgataggatgttcaccttgcaattgctctaagacatctacagcagtagaatatcctgttttcgtctttttaataacaggtaattgtaatgtctcaaacaatacaacacctaattgcttaggagaatttatattaaaatcttcaccagctgcatcatggatatttcgaatcaagacgtctaatttttcttgaatttctttttccatttcttctaaatcatgaacatctgtaaatataccaatttcttccatttcacttaaaatcttagctagcggtagctctaaatcagccaagagttctacctgattgtattcttctaattgtttatccatatttggtttcgcaaagtaaattgcatcagtaatagaagcaacatatggatttaaaacatcatcttcaggtaccttaaatttcttaccttttccatatatactcacatcgtctttcacaaaactttgaccgtacaatgaaacaactgattgaacatcactaatcgtacgagatggatcaattatataactggccaacataatatcgaaagaaatattttgaatatcaatccccaatctatgtgatgctacatatgtttttttagcatcatatacgacttttttcgaattcggattttctaaccatgaaactagttcgacataattatttatgtcatccgcattaattacaatatgtttctcacctgtaaataaagagaattttaaaatattatttcgcaaatagttaccaccgtctaattcgaaatggatggccgcttctttcaatgaagtaaaatcaatattatcaaaagacgtttcaatttcaaatgtcttttctattgcatcttcaacgcttgctgattgatcaatgtcagccaacaattgtttgaattctaacttcttaaacaattcgattttttcttgttgttcatcttgatgagtcattaacgtatcttcaagttttacttcaatcggactatctacattaatcgttgctaattctttactcattaatgcatcttctttgctattttgaagtttttcttttaactttttacctgaaatttcatctaaatgttcatagacaccttctactgtgtcaaattggtttagcaattttattgctgttttctctccaacacctgcaacacctggtatattatcagaagtatctcccattaatcctttcatatcaataatttgattaggtgttaacccgttgtatttttccgcaataaagtcaggtgtataatgatcaacatcagtaacaccttttttagtgtaataaatggttacattatccgttgcaagttgtgttaaatctcggtctcccgtaataataattgtctgaaagcccgctttatctgcttctttacttaaagttccgataatatcatctgcctcatagttatctaattcataacgtttaatatgataagcatctaataattggcgaatataaggaaattgctcacttagttcaggcggcgttttctggcgtccacctttatattcactatatttttcatgtctgaaagtcgttttacctgcatcaaacgctactaaaaaatgatttggcttttcttcttttaaaatcttctctagtaacattgcaaaaccatatactgcattggtatgaatgcctgctttgtttgataacaaaggtaatgcataaaaagctctaaaacttaagctattaccatcgattaatactaatttattcacaattttaacctccagaactaatttatatatattttagcatattcgactgtgatgtcgtaattaaagaaactatctcatagagtatttatacacgacctaatttcaaataaaacaagtgcctatatagacttagctaaaaaataaaaaagacataatcatgattgttcttgatgagcactccataaagtcaggttaaaagtccaacttttgagatgcacattatcatttcatgattatgtctactttttaatatttttatgctgctattttaaatttttataggtaagaataagttatgaatcgtctgaaccaaatggaatatatttaactttggtcattttcggtaattcttcataattattaaaccactcttggtaatttttattgattggtgacggatgatgcatataatgttcaaacggcaatgattccactgtataaacctcttgtcgtggatgatctttaatttgttgttttaataactgaactcttttttcatgttcataatgaacataaataaatgcactaagatatatcacagctaaaactagtgatgcacctttaataaaattaacattgattgacttatatttccgaaattcttttaataaaataattaaaatgattacatgtatcgtataaacaatcaaaaaattacctggttctattggagtaacaatgactagtgtcgacgccgaaacacatattgcaataagtaaggaatataaagtgatttgtgttttacgatcattaatagacaaataaatacctacaaatatcgaaaacgcaaagtaaccacatacaattacgttcacaaaaccaaccaatccaatatctgtatttttatttaataaaaactgattgtaaaatagtaaataataaagcggtaaagtgataaatcctatcataatgatacgacgctttaatattgttaaatgtacataccgatcacttctaagcagtagataaataataagcgctgcaatcatacttaaaattataatctgactgaaaatgacaccatatggaagtgacgttgatatcatttctgcaaattttgaaaagataccttgattatttgaaacttgttgatattctgatccttcaaataaaattttgcgataatttggattggaaaacataatgattgtacctatagtagcaatcataaatgaaaacaataatttataattaagtgttcgatttgcagtaaattcatacagaaaagctaaaattaaaatgatacagtggaataatgtcacattctccataaataattgaccgaagaagcataaaacatagaatagtacagtaacacttaccggctgcttttctttatatataattgcattaatacaataataaataataaagagtgaaattagtgttgatgtcgcataattataaaatcctgcaaaccagccatatgtatctgcataaatagcacttggtaaaattaacattaaagaaaatgctaacaaataatagcttgtccacgctttacaacgtgtaatgtgcataatcatccaaatgatgcccatactaatgaggccatatgaaagccaacgtaaccagcttacatgtacagctataatttcaaagatatttccgatatagcgaccattaagtgatgcaaatcctacttttaaaatatcagtattataattgctaaaccattgtaaatcatcgtgcatgagtggtagtaagatacccataaaagtataaaacaataatatcgcaattaatatcaaagttgtcttgtgtaattgaattgttttcactttgctaatcctcaaatctagttaaattttcctcaacttgtaggtcgaaaaattaattcaatatttttaatgtatttctaattttcacctatgcatgtttcctcaatcaaattagataaacaaggtatttaatattactttcaacaatttatctaaatcgcccctcgtctttttctatgacgaatgattacacttgtctattcaagtgtttaaattaagatttatttccgttcaaataaaacttattactttttaattaagcatctatttcaagcgcgttactaaaatttctttattataataaatatattataaaattgcttgattcacaacaatctattacttataacttacaaatcgacatatacaaatgacaaaattgacaaccgaatttattccacttcattaactctaatttaataccaatagagatttgaacgaaataaaaaagcagcaacaacttcgtgaaaaatacacgcgctgttaccactttaatttttattctttataatcttttagaataactttgaacgttgagcctttgccaacttgactattcacttcaatattgccttggtgggcctctactatatgctttgtaattgataatccaagacctgtcccaccagaatctctacttcgtgctttatctactctataaaatctttcaaaaatacgttgttggtcttctaatttaatacctataccaaaatcttgtacttcgaaaatgacacgaaagtcatctcgatacacacgaacgttaatatctccatcttcataagaatagttaattgcattcgttaacaaattcgtgataacttgagcaattttactttcttgtgctttaacaatgacatctttttcgatatcagtatgaatggaaatatttttttgattggcttgagtcatcatattatcaataatacgccgcgttaaatctgataaattcatatagtctgtatctaactctgtatgttgctcaatatgcgataaatctaacagatctgttactaaagattctattcgatttgattcttttaaaattatgtttaaaaacatgtctaatgattccgcatcattttttgcaccatcaataagcgtttcagcaaaccccttaattgaagtaataggtgtttttaattcatgtgaaacatttgctacaaattcacgtcttagattttcaagttgtttcagatttgttatatcatgcatcacaactaaaatcccttgcaaacttttttgagacctagttaaaatcggaacgcatgaaatatcaaagtacttggcatggacttggtttattgcaacttccaattgttcataaataggtttttcaactttaaaactttctaaaattaattgctcaatttcagtattaacatagccgtgatagcctacttgttcaatattatgcgagatgttgaactgttcataatacgctttatttgcaacaacgatttttccatttcgatctatcattaaaatagcacttggaatattttcaatcgttgtttttaaacggttggattgaattttttgctcattattaagcttttgaaggcgtcgtgctaaatcattggtagacacaaaaagcgctttagtttctacaacattactttcaggtacacgtatgtgataataaccatttgccaacaattgtgttgcataagtaacttcttgaatgggacggattaatgtacgcttaaaactacggcttgcaaaatacagacaaatgagtacaactaaacatgtcaaaataagatatttccacaacgtccaatgcatttctgtaatatcgttattgtaacctttaatccatacatgataaccgttaaccttcttattaaaaataaaaacgtcccttttttgaatatagctatcactatttgggatagctttcagtttgccactactaaacacctttttatcatgcttagttatcaataaatctatattttgctgttttacaatttttttaactttatcaatctcattatcttggactaaataaatatatgatcttgcatctgttgctagagcttgttcgtgtttttctgataaaacatatgtgatggaagcgtgaataataatgcctaatgtaacaaaactgataattaatatactgcttatcaataacattaagcggtggtgaaacttcatcattgttctttaggtctttccaatttatagcctaagccacgcacagttttaataagttgtggcttcttaggattatcttctaatttatctcttaaatgactgatatgtacatcaacaattcttgagtctcctgcaaattcataattccataccgtatttaacatatgctctctcgtaatgactctgccttgtctttctatcaaataaagcaagagttcaaattctttcggtgttagctccaataactcattatgcttatatacttcaaaataatcgggtctaatacgtatcgatccgatggtaatatcatcgtcaatctcttctacttcttttacaaattgagaacgtcttaaaatggctttcacacgggcaacaacttctctaggtgaaaaaggcttagtcatatagtcatcggcacctaattctaaacctaatacccgatcaaattcatcatttttcgccgttaacattaatatagggactaaatttttatttgttcttacagtcttacatacgtcaatgccatcttttttaggtagcataacatctaaaataattaaatctggctgttcactttctaccttttctaaagcctcatcaccatcaaatgcgacaacaacttcataaccagctgtttctaagttatatttaagtaatgttacgattgaatgttcgtcatctactaccaacactttttgcgacatggtatgcctccctaacttataattatatttacattataaccgaactatttataaaaataacatcctacacattatctttacacattttttacattactttacatataaataaaatacttcttatatttccttctatcatttgcatgacttactctgggacaacgaaataaattttgtaaaaatagcatttctatcccactacctatgcatgagttttactcatttattcctaagcttatgtacatattcgctttgtctaatgtgtaagaaacactacataatcaatcattggtgactctttattatttctatcctgttgccaacttcaattcatttaaaaaggcgaacctagcaattaaagttgctagactcacctaattttattttgcttattttaaatttttaatcaattcatctgcaaatgctgatgtagaaacttcttcagcaccatccattaaacgggcaaagtcataagtaacaacttttgaagcaattgtatcttcaattgaatctgtaatcttatctgccgcttcttgccatcctaaatgttctaacattaatacagaacttaaaattactgaagatggattcactttatttaaacctgcatattttggagctgtaccatgtgttgcttcaaaaatagcatgacctgtttcataattaatgtttgcacctggcgcaataccaataccaccaacttgtgcagctaaagcatctgaaatatagtcaccattcaagttcatagttgctacaacatcatgctcagctggacgagttaaaatttgttgtaagaaaatgtcagcaatagaatctttaatgataatcttgccttctttttcagctttttcttgagcagcattagcagcatctctgccttcattttcaacaatttcgtcatattgttgccaagtgaatacttgatcaccaaattcagataatgctaaatcgtaaccccactgcttaaatgagccttctgtaaatttcataatattacctttatgaactaaagtaactgatttacggttattatcgatagcatattgtatagctgctctaactaatcgctcagttccttctttagaaactggtttaataccaatacctgaagtttctgggaatcgaatgtttgtcgcacccatttcgttttgtaagaagtcaattacctttttaacttctgttgtaccttctttaaattcaataccagcataaatgtcttcagtattttcacggaaaataaccatatcaacatcttgtggacgtttaacaggtgatggtactcctttaaaccaacgtaccggtcttaagcaagtaaataaatctaattcttggcgtaaagccacatttaatgatctaataccaccaccaattggtgttgttaaaggtcctttaacagcaattaaatattctttaattgtatcaagtgtttcttgaggtaaccattcaccagttgtatcaaatgctttttggccagctagcacttctttccattcaatgcgtttttcgccattataggctttctcaacagcagcatctataactcggcttgctgccttccaaatatccggtccaattccatcaccgataataaatgggataattggttcattaggtacgtttaatccttcagttccttgagtaattttttctgcagtcatagttattttacctccaaattttacatcttcatttttaatttgtattgattattttctttcttcaagcgggatatacttacgattcgtttcgccaatatatttcgctctaggacgcataattctattatctttatattgttctaaaatatgagcaatccatcctgcagaacgacttacagcaaagattggcgtgaataagtcatgaggtatttccatacagtgataaacactcgcactataaaaatcaacattaggaattaatcctttttcttctgccatacgtttttccattttcactgacatttcaaataattcttcacgaccagcgtctttcgtaatttgacggctcatttctcttaaatatttcgctctaggatcaccatctttatatacacgatgaccgaagcccattactttatctttattagcaaatttttcatctaagtaagcatcaacattttcaattgacccaatctcagataacatcgtcataacttgttcgtttgcaccaccatgtaatggccctttcagagaacctacggctgctacaatacctgagtacatatctgacaatgatgataccgcacaacgtgccgtaaatgcagatgcgttcaactcatgatcagcgtgtaaaataagtgctttattgaaggcttctacttctatatctgttggtaattccccacgtaacatatataggaagtttgccgcataacttaagtcaggattaggcttaagtggttctttatcttgtcttactcgagcaaacgctgtaactaatgatgctactttagcctgtatacgcattgctctttcataacgattttcatctgattcattttcagcatcaggatcgaaatgtgcaatatatgataatgacgtacgtaatgctgtcattggatgcacgtgatctgtaacatactcctcaaaatgtgtatacacacgaggatttaatgtcatgtattgatttaatttcccttttagatgagcaagctcttcttcgtttggcaatctatagttccataataggaaaataacttcttcaaattgcgcattttcagctagatcatcaatatcatagccggcataagtcaattgactttcaataattgaacttattttagtctccgctgcgataaccccttctaaacctctttgtaattctgctatgataaatttcccctttactgtttctttatgaaatggctttcaactaatattatagctaaacgcatttcgtttgtgaaatataaaaactggcattatatgtgcaacaatttttttgtaaatctatgtaaatgtcacagaatagccacaaatagcaccattaaagctttttcaagatgtgaataatccatgaattttacaatagaattaaattttcaattggttattatatatgattataaaaaccaaagtatattaacatggaattttacacatttttaccgaaaataattgtatatatctcaatataagtgcataataaacatatctatatttaagggagatgtattatggctgaaaaattacaaagggaactgagcaatcgccacatacaattaattgcaattggcggtgcaattggtacaggcttattcttaggtgctggtcaaacgattgcattaaccggcccttcaattctattaacatacatcattataggatttatgttatttatgtttatgcgaggtttaggagaaatcattatacagaatactgaatttaaatctttcgcagatgtaaccaatacatatattgggccttttgcaggatttgttaccggatggacatactggttctgttggattattacaggtatggctgaagtaacggctgtggcaaaatatgttagcttttggttcccagaaattccaaactggataagtgcactattttgtgtactgttattaatgtcattcaacctacttagcgcaagacttttcggagaattagaattttggttctctatcattaaaatagcgacaattattggtttaatagtagttggtttcgtcatgattctatttgcatttaaaactcaattcgggcatgccagtttcacaaatctatatgaacacggcatattcgctaaaggtgcttctggattctttatgtctttccaaatggcactattctcatttgtaggaattgaaatgattggtgttacagctggggaaacaaaagatccagttaaaacaattccaaaagcaattaacagtgtacccattagaattttaatattttacgttggggcgttagcggttatcatgtctattatcccttggcagcaagttgatcctgataacagtccattcgtaaaattattcgcattgatcggaattccgtttgctgcgggcttgattaattttgtagtattaaccgctgctgcttcatcatgtaacagtggtatattctcaaatagccgtatgcttttcggtttatcaagtcaacaacaagcacctccgaacttttctaagacgaataaatatggcgttccacatgttgcaatctttgcttcatcagcattattacttgtggcagcattactaaactatattttcccagatgcgacaaaagtatttacgtatgtgactaccatctctacagtgttatttttagttgtatggggtctgattatcattgcatatatcaattatagtcgtaaaaacccagatctacataaaaatgctacgtacaaactattaggtggcaaatatatgggctacttaatatttgtattcttcatttttgtgttcgggttattatttattaatgttgatacaagacgtgcaatttattttattccgatttggtttatacttttagcatttatgtacttaagatataaacgtatcgctgctaaatcaaataaataacaacaagttttagggcttgggacattaagttcttaggcaatgtaaaaaagctgatttctattaattatttgatagaaatcagcttttttgatatgtattttataatgtacagctcgttgagctgctattttccttatattaagtgccatcaatacaaaacctagctctcgtttaactttatttattcctcgaactgacattcgagtgaaacccaaaatagccttcataaatccaaaagcaggctctacatcaatttttctttgactatagatgtttttcgtttctggttcagaaagcttttgattaatttggactttaaagtattcccaattataattcttcatgattttcttattggatttcgaatttggtttcatgcattgatgtctcaaagaacatgatgaacagtcatcacattcatatagtttgaagtctcgtttaaaaccatatctatcattacggtatgcatatcttttaaaacctattcttttgttattaggacatataaattcattattaagttcgtcatatttccaattttgagtgttgaaaatgccacttttaaactttctagttttatctttaataaacatgccatacgtaataagtggcgttttattaaaatcatctataatagccatatagttttgctcactaccataacctgcatcagctacaatatactctggtaaataaccgaaggtattttgaatcattgttaaaaatgggattaatgttctagtatctgttgggttttgaaataggtcataggataaaacaaattgagaatttgtcgctatttgtaaattgtatcctggcttaagttggccatttttcatatggtcttccttcattctcataaaagttgcatcatgatcagatcagttttagaaaaactatttctatctttaagaatcgatttttgttcttcatatttattttttctttcggaataatcatcaaatttctttttgaacttcttaatctcagttatttttttacgggtctgttttctaatttgagcacaatcttcgttctcaatagaatgatttaaatcttcgatttctttatctaaatgactaccaattaaatctatttcttctattgttaaatcgctatctccatcttcttttatctctggtattattttttcttcaactaagtcacgatataatgtttttgaattttcgttcaatttcgattcgtgattttgaatacttttcttccacacaaatgtatatctattggcattagcttctacttttgtaccatcaataaaaattgaattattatcaataagattttgctttaaacattgactatggaactgaataaataaagattcaattaacgcatcagtattaggattcactctaaaacgattaatagttttataagaaggtgtttgatcttgagctaaccacatcattcgaatactgtcatgaagtaatttttctattctacgaccagaaaatacagattgagtatatgcatataagatgatttttaacatcatttttggatgataggatgttgcgccacgatgatgtctgaattcatcgaattcgctatcaggtatcgtttcaacaatttcattaacatatcgcgaaatatcattttgaggaattctaacagaggtttctattggtagtgtaagttgggtcatgttataaattttatacataaggcacctcgttaatttagtttagtggtatttattaaattatacgaagggacccaacacagaaaattcattttattgaattttacatttatgtgcaagttgggcaaagtgttttatttttttaaagtatgtaaaagtaaaattacatgttaatacgtagtattaatggcgagactcctgagggagcagtgccagtcgaagaccgaggctgagacggcaccctaggaaagcgaagccattcaatacgaagtattgtataaatagagaacagcagtaagatattttctaattgaaaattatcttactgctgtttttttagggatttatgtcccatcctgttttatatgcaacttataatattaaattgcgtacttggctcaaaacttttactttctcatctatttaataatgtatcatttcagaaatacatccatacttctattttataataaatttccaaagtaatatgagtgaaagtttgaaggtgataatgtacatgtataaaagatataaacatttatatagattgccattcatacactatcattatcaaataacctattaattacgtcataaaataccagatgaaccaaaaaacgcctttccattgttgataaatggaaagacgtttttttataaattatagtacgtttgcatatccttcaaagattttaccttgagcagcatcaatcgtaactaacatgttattgcttatgtttttaacagctttttctacacctacaactgttggaatacctttttctaaaccaacaattgcacttggtgatgtaataccattttcttctgtaattaagcctaaagctttttctacataaggtacaaacgtttcatcgattgagttagtaacgataactttgtcagataaatctttaccttctaaatctttaacagtttcagcaactaacgtagtaccaacaactgatccacgtccaataccttgaccattagcaatttcgtcaccaactaggtggattttcatcatattagtagttccagtttcaccagttggtacaccagcagtaataatgattaaatcaccattagatactctaccagtttcaacagctgttgcaactgcattgtttaacaatgcatctgtactcttacgtccttttttaactacaggttgaactccccaaacaattgaacattgacgtgcagtttcttcacttggagtcaccgcaataatgtctgaatgtggacgatatttggagatagtacgtgccgttgaaccactttcagtagcagctacaattgctttaacatttaagtttaaagctgtatgtgcaaccgaaataccgatagcattcactaatgaagtttcaactaatttagtacgatctgacaataactttttgtaatcttgggctgcttcagctgatacagcaatatttctcattgttttaacagcttcttcaggatataaaccagcagcagtttcaccagataacattactgcatctgtaccatcatagattgcgttggcaacgtcactagcttctgcacgtgtagcacgtgggttacgttgcatagaatctaacatttgtgtagctgtaataactggtttacctaatttgttacattgtctgattaaatctttttgaaccattggtactttttcaggtggaatttcaacacccatgtcaccacgtgcaaccattaaaccatcagacacttcaagaatttccgcaatattatcaataccttcttggttttcaattttagggaatactgaaatgttagctttttgttcttctaaaatttcacgaatttctaaaacatcactaggacgacgtacgaaacttgctgcaatgaagtcaacattttctttaataccgaaacggatatcttcagcatctttttctgtaataccaggtaaacttactcttacgccaggtaagttaacaccttttttgtttttaagctcaccagagtttaaaatatcacatttaacttcttttttagcatggtcaatatctttaacttgtaattcaattaagccatcatcaagtaaaatgtatgaacctacttgaacatcgttaattaagttttcatatgttactgagaacttttcaggtgttccttcaacttcattcatgctaacaataacttcgttgccacgttcaagttcaatgataccgtctttcatattatgcgtacgaatttctggaccttttgtatctaataaaattgctacaattttgtctaatcttttagctactttacgaattgtatcaattctacctttatgctcttcatgactaccatgtgaaaagtttaatcgtgcaacgttcataccagcattgattaatttctcaatcatttcttctgattctgaagctggtccaattgtacatacaattttagtttttctcattttataattcctcctgaaatcttatatagataacttgttagcaagttcatatagactataatcaaatttatgatctttaccatcaaaaatttcatcaaaagatgttgctacaattttattgttcttaattccaacacccttagctgtttcaccttgcattaataagtctaccgcatatccacctaaacgtgatgctaaaactctatccgcacctgttgggctaccaccacgttgaacgtgacctaacacagacactctattatcaacattgatgtattgtgataattctttttgacaatcttgcgcagtcatacaaccttctgctacaagaacgattgagtgtttcttaccacgtttaataccttgttcaattttatcagctatttctttaatatctgttttcacttctggaactacaattgtctcagcaccaactgataatccagcccataatgctagatctccacaatcacggcccattgcttcaatgataaatgttcgtgcgtgacttgacgcagtatctctaattttgtcgactaagccaataatcgtatttaatgctgtgtcaaatccaattgtaaaatcagtaccattgatatcattgtcaatcgtaccaggaataccgatagtttgaatttctttacattcctcactgatgcgttgtgcaccgcgataactaccgtcaccaccaataactacaaggccctcaatccctcttttacgtaagttttcgattgcaactttacgtacttcttgctccttaaactctggacatcttgctgaatacaagaatgtacctccacgctgaatcgtatccccaactgatcctaattcaagtttatgaatatcatcatttaacaatccttggtaaccatgatacacaccataaacttcaatttcattgtaaattgctgtacgaacaactgctcttacggcagcattcattccaggtgaatctccaccactagttaaaactgcaattttcttcatgacgacatacctttctataactgatttatctttaactctaaattaccacaaattgatatgtcattccatcaaaactaatgtattgaattgatgtaaacgttttaaatattgaattttattttaacttaattaaaaaaagattagtagccacaattttgactactaatcttagttaaaattcagtatctaaatattaaattattgttttaatgtacttcaatttatggtaaaacccagtatcgatttaacataaaaatgctcaagttgattattctatataagaaccgatatttctgaatttttcaaagcgatcattagcaatttcatcacgtgataatgactcaagtgaatctaactgtgcaacaaacgctgatttaatagctaaagcttgctgttcaatatctttatgtgcaccgccaagtggttcagaaatgacatcatctataatacctaattgcttaatatcatgggcagtaattttcattgtttcagctgcaattttagccaaattactgtctttccataataatgccgctgcaccttcaggagatataacagagtaagtactattctctaacatcaatactttattggcaataccaatacctagagcacctccactgccaccttcaccaatgacaatcgcaataactggtacttttaatgaagccatctcaatcaaatttgttgcgatagattcactttgtccacgttcttcagcagctttaccaggatatgcaccttttgtatctataaatgtaaagataggacgattgaatttttcagcttgtttcattaaacgtaatgcttttcgataaccttctggatgcgccataccaaaatttcgataaatattatcttttgtatcttttccacgttgttgtccaataactgtaacagcacgaccatttaaaaagccaataccaccaatcattgctggatcatctctaaaattacgatcaccatgtagttccataaacgaatcaaagatatatggaatataatctagggtcgtaggtctttcttgcaaacgcgcaatttgcacacgatcccatggttttagatttgtatatatttttttagtttctcgttccaatgacgcttcaagcatgtcaatttcttcttgtaaatccacatcatttttatcttgagattcttttaaagattcaattttatttcgaatttcaaaaagtggtttttcaaaatctaacattatttagtcacctcttgatggatttttagaatttcagacaatgtttgacgcatatcattacgatgtacaactttatccaattgtccatgctctaataaaaattctgcagtttggaaatcatctggcaatttttcgtttattgtctgttcaataactcgacgacctgcaaaacctatcaacgcttttggctcacttaaatttatatcaccaactgatgcaaaacttgcagatacaccaccagtagttggatgtgttaaatatgatatatataatagtccagcgtcagaatgacgttttaaagatacactggttttacccatttgcatcaaggaaataataccttcttgcatacgtgcaccaccacttgcagagaaaagaataaatggtaaacggttctcagtgcagtaatcaatgatgcgacatatcttttcaccgataaccgatcccatacttcccattctaaaacgtgaatccatgacagcaacgccaaatttcataccatctagttgtgctgtaccagtcacaactgcttctttaagacctgtcttttgttggtccttttcaattttttctaaataacttggaaaatctaatggattcgcagaggtcattcccttatcgaattctgtaaatgatccttcatcagaaattgcttctatacgtttatacgcagttaaagcaatatgatgatcacaattaaagcacacatttaaattttcagctaattcttttgtgtacataattttcttacactttggacacttagtcataatacctgcaggcacatcattatttttagagtcttgtactgtaagatatttctttttctttgttcgattaaaaaaatctttaaacataggaaaacctccaaataacctctgttctaaccatttagagccttaaactgaacttgaccagttaaaaacgggtttaaatttatttgatttatattcgtttgactgttgaatgtttatcataaactttcattttcatcattttaatgactctttattgctaacttttaagcaatttaattaaacgttaattatttttattgtaaatctgtaagtttcattgttttatcatacacatcttgcggatcaacttcaatcctagctactccagattccattgccgctttagcaacattacgagcaactgatggcgctacacgtttatcaaacggtcctgggatacagtagtcttcatttaattcagaactatcgattaaatcagcaatcgcttctacagctgcctttttcatttcttcatttatatgtgtagcttcaacctctaatgcacctctaaaaataccagggaaagctaatacattattaatttggttaggatagtctgaacgtcctgtaccaacaactcgtgcacctgccgctttggcatcatcaggtattatttcaggatttggattagccattgcaaatataattggattatctgccatactcttaaccatatcttgtgacagcgcattagctacagaaaccccgataaatacatctgcgtcttttacgacttcttctaaagacccttcaatcttatctttatttgtccattttgctacaacatctttcgtaggattcataccatatgaacgtccttcaaaaattgcgcctcttgagtcacacataaccatatttcttacaccatacgcgtatagtaatttaacaatggctattcctgctgcaccagcaccatttagtacaacttttattttagcaatatctttgttaacaactctcaatgcatttaccaaacctgccaatgttacaattgctgtaccatgttgatcgtcatggaataccggaatattagtttcttttttcaatcgttcttcaatttcaaaacaacgtggtgccgaaatatcctctaaattaataccaccataattaggttctaacaacttaactgttttaatgatttcttcggtatcagttgtatttaacgcaataggcaccccattgataccagcgaagcttttgaataatactgctttaccttccattacaggaatacttgcttcaggtccaatgttacctaaacctaataccgctgttccatcagtaataactgcaactgtatttcctttaattgtgtaatcatatacttttcttttatcttcataaatatctttacacggttcagcaacgccaggtgagtatgctaaacttaattcctctttattagtaacttttacatttggtttaacttctaatttaccttgattacgtttgtgcatttccaatgcttcatctcttaatgacatgaaatcagcccctaattcaatatttatttttaaaaaataacttggataaaacgcattacattataaaagtaaaaatattgggtaaatctgaatgagtaagaatttatggttttgattatgtaacacaaatagcgataaacgataataaaataatatttataaagatacattaaaccatactatctaaagatatacctttaattattataatggatagcaaaaaccaatatatcaaaaagttattatttttccgcacgatatatcgacaaaattctttactcaatttatgtatactgctttttgtgctaattattcttatggattaatcaataatgtaaagtgaaactcataaaaataataagcataaaaaactaatataaacgcaaactgatggttaaaaaatatctaaccatcagtttactatatcataatttattagttgataaaagttatataagcctaatatcactagggttaaaggattgtataaaattattaaacatactatctttttgattaatatagcctaaagtagtcatttgtttaatcgtttcatcataaaaggataacacaacatcattagcattctctttcgtagctttaatcatctcttcaaacatatctatttgtgatttatttctaattataatttgtttggcaaatgctaatttttgttcttcaaaagtggctaatgtctgaatctcatttataattagttgacgttgttgctttctatggtcaaatttcccgctaactataaacaagtcattatgtgataacaactcttcgtactttttaaactgattagggaaaatcacaccatctaaagtttcaatgccatcatttaatgtgacgaatgccatattttgaccatttttagttcgaatttgtttaactttatcaaactgtactaatataggtttataattctgcgcgttactcaatttaaatatcgttaaatattgtttggcaacaaactttttatctactgggtgttgcgaaacataaaatcctaaatattctttttcgtactgactaataagtgcatcaggcaattcttctttatcttcatacatctgttttggcgttaaaatatcaaataaaaaaccatcttgttcaatgtttaaatcgccatccaacacttgatcaatagcttgcaacaacgttgaacgtgttttaccaaaagcatcaaacgctcccactaaaatcagtgcttcaagtaactttctcgttttgactctcttcggtatacgtctagcaaaatcaaagaaatctttaaatttgccgttctgataacgttcatcaacaatcactttcacactttgataaccaacacctttaattgtaccaattgataaataaatgccttcttgggaaggtttataaaaccaatgactttcgttaatgttcggtggcaatatagtgataccttgtttttttgcttcttctatcatttgagcagttttcttctcacttccaataacattacttaaaatatttgcgtaaaaataatttggataatggacttttaaaaagctcataatgtatgcaattttagaatagctgacagcatgtgctctaggaaaaccataatcagcaaatttcagaatcaaatcaaatatttgcttactaatgtcttcgtgataaccattttgctttgcaccttctataaaatgttgacgctcactttcaagaacagctctattttttttactcattgctcttcttaaaatatccgcttcaccataactgaagtttgcaaatgtgctcgctatttgcataatttgctcttgataaataataacaccgtaagtattttttaatataggttctaaatgcggatgtaaatattgaactttgcttggatcatgtcttcttgtaatgtaagttggaatttcttccattggacctggtctatacaaagaagttacagcaacaatatcttcaaagtgttccggctttaatttttttaatacacttcttacaccgtcagactctaattggaatatgccagtcgtatctccttgcgacaacaattcaaacactttttgatcatcaaacggaatcttttcgatatcaatattaatacctaaatcttttttgacttgtgttaagatttgatgaataatcgataagtttctcaaccctagaaaatctatttttaataacccaatacgttcggcttcagtcattgtccattgcgttaataatcctgtatcccctttcgttaaaggggcatattcatataatggatggtcattaataataattcctgccgcatgtgtagatgtatgtcttggtaaaccttctaactttttacaaatactgaaccagcgttcatgtcgatggtttcgatgtacaaactctttaaaatcgtcaatttgatatgcttcatcaagtgtaattcctaatttatgtgggattaaacttgaaatttcatttaatgtaacttcatcaaaccccataattcttccaacatctctagcaactgctcttgcaagcagatgaccgaaagtcacaattccagatacatgtagctcgccatatttttcttggacgtactgaatgaccctttctcggcgtgtatcttcaaagtcaatatcaatatcaggcattgttacacgttctgggtttaaaaaacgttcaaataatagattgaatttaataggatcaatcgttgtaattcccaataaataactgaccagtgagccagctgaagaaccacgaccaggacctaccatcacatcattcgttttcgcataatggattaaatcacttactattaagaaataatcttcaaaacccatattagtaataactttatactcatatttcaatcgctctaaatagacgtcataattaagttctaattttttcaattgtgtaactaagacacgccacaaatattttttagctgattcatcattaggtgtctcatattgaggaagtagagattgatgatattttaattctgcatcacacttttgagctataacatcaacctgcgttaaatattcttggttaatatctaattgattaatttccttttcagttaaaaaatgtgcaccaaaatcttcttgatcatgaattaagtctaattttgtattgtctctaatagctgctaatgcagaaatcgtatcggcatcttgacgtgtttggtaacaaacattttgaatccaaacatgttttctaccttgaatcgaaatactaaggtggtccatatatgtgtcattatgggtttcaaacacttgtacaatatcacgatgttgatcaccgacttttttaaaaatgataatcatattgttagaaaatcgttttaataattcaaacgacacatgttctaatgcattcatttttatttccgatgatagttgatacaaatcttttaatccatcattatttttagctagaacaactgtttcgactgtatttaatccatttgtcacatatattgtcataccaaaaatcggtttaatgttatttgctatacatgcatcataaaatttaggaaaaccatacaatacattggtgtcagttatggcaagtgcatcaacattttcagacacagcaagtcttacggcatcttctatttttaagcttgaatttaacaaatcataagccgtatgaatatttaaatatgccaccatgattgaatggcccctttctattagttaagttttgtgcgtaaagctgtagcaagttgctcaaattcatcccagctgtccactgaaactcctgacgcattcggatgaccaccgccaccaaaatcttgcgcaatatcattaataatcaattgccctttagaacgtaatcgacatctgatttcattaccttcatcgactgcaaatacccatattttcaagcctttgatgtcagcaattgtattaacaaactgagatgcttcatttggctgaataccgaattgctccaatacatcttcagttattttaacttggcagaatccatcatccataagttcgaaatgttgtaaaacataaccttgaaacggcaacatttttgggtccttctccatcattttatttaaaagcgcattatgatcaatatcatgcccaattaactttccagcaatttccatagtatgttctgaggtattgttaaaaaggaatcgcccagtatcaccgacgataccaagatataaaacgctcgcgatatctttattaacaattgcttcatcattaaaatgtgagattaaatcgtaaatgatttcacttgtagatgacgcgttcgtattaactaaattaatatcaccatactgatcaactgcaggatgatgatctattttaataagtttacgacctgtactataacgttcatcgtcaattcgtggagcattggcagtatcacatacaattacaagcgcatcttgatatgttttatcatcaatgttatctaactctccaataaaacttaatgatgattccgcttcacccactgcaaatacttgcttttgcggaaatttctgctgaatatagtattttaaaccaagttgtgaaccatatgcatcaggatctggtctaacatgtctgtgtataataattgtatcgttgtcttcgatacatttcataatttcattcaaagtactaatcattttcatactcccttttttagaaaagttgcttaatttaagcattagtctatatcaaaatatctaaattataaaaattgttactaccatattaaactatttgcccgttttaattatttagatatatatattttcatactatttagttcaggggccccaacacagagaaattggacccctaatttctacaaacaatgcaagttggggtggggccccaacgtttgtgcgaaatctatcttatgcctattttctctgctaagttcctatacttcgtcaaacatttggcatatcacgagagcgctcgctactttgtcgttttgactatgcatgttcacttctattttggcgaagtttcttccgacgtctagtatgccaaagcgcactgttatatgtgattcaataggtactgttttaatatacacgatatttaagttctctatcatgacattaccttttttaaatttacgcatttcatattgtattgtttcttctataatacttacaaatgccgctttacttactgttccgtaatgattgattaaaagtggtgaaacttctactgtaattccatcttgattcattgttatatatttggcgatttgatcgttaattgtttcacccatctgaggctgtcttcctaaaagttgcatagactttaaaacatcttgtctattaatcacacccactgtctttttattactcgaaacgacaggaatcaattcaataccttcccaaatcatcatatgcgcacaacttgctactgtactcatagcatttacataaataggatttcgcgtcatcactttatctatttcgtcgtcgtcctttgtattaatcatctctcgacttgttacaatacctactaatttatacgactcattgactaccggaaatcttgtatggccagttcgattcgccatacgcttataatctgctattttcatcgtatcaaacagcacagataaatcatctaatggcgtcattatatcttgaactattaagatatcttttcgtattttctgattaaaaagtgctttgttgataatatttgcaactaggaatgtatcataacttgatgatagaacaggtaaatcatgttcattcgcaaaattaataactttattagatggcttaaatccaccagtaattaatatagccgtacctctttttaaagcttcaatctgcacatcttcacgatttccgacaatcaataatgtctttggaccaatatactttaaaatatctttgagttccattgctccaattgcaaatttagataccatcttagtgatacctttgttgccacctaacacttggccatcaataatattgacaatttcattaaaagttaaatgttcaatttcattacgattacgtttttcgattcgaaccgtaccaacacgatctatcgttgcgaccatgcccattttatcagcatctttaattgcacgatatgctgtcccttcagatacgtttaaaaatttagcgattttacgcaccgaaattttagagcctatagataacgattcaatataatctaaaatttgttcatgttttgtcattctttacctcttcttttcgaacagtattaactacattataactttattttggataaaaagcattgaagtgaaatgaaataatgatcgtttcacctattttattttttgaaaatatacaacaaacacaaagatcacaaaatctttaattttaaatggaaaaatccattattatttattagaatgtaagtgaggagggatgtactaatgtataaaaatatattacttggtgtagacactcagttaaaaaatgaaaaagcactaaaagaagtgtctaaattagctggcgaaggtacagtcgtaacagttttaaacgcaatcagcgaacaagatgctcaagcatcaattaaagcaggtgttcatttaaacaaacttactgaagaacgaagcaagcgattggaaaaaacacgcaaagctttagaagattatggtattgattatgaccaaataattgttcgtggtaatgcaaaagaagaactattaaaacatgctaatagcggtaaatatgaaattgttgttttaagtaaccgtaaagcagaagacaaaaagaaatttgtacttggaagtgtcagccacaaagtagcaaaacgtgcgactatccctgtattaatcgttaaataaaatttttatccagaatcacaaataatctttcaatcatgatgcagtctcaaacgactgagtaaatacaagaaacgattatgactgtggttctggattttttatatcgtagtaaatttataatcaatgtctaattgtataaaactaaaattacgagagtaggtcagaaatgataaagaaccactgatgtcccccgtccacgtcgtaactgaatcagtagaatataaaaacacccactaaaaatatgcagacgataacttccacatagattagcgaggtgttttttagtgtaaaatctatattctatttaaaactgaacagattcacctggttttaaaatttgcacgtcccctacattaacagcatctttaaattgttgtggatcttgttcgattaatgggaatgtatcataatgaatcggtacagaaatttttggtttaataaattcattaatagcataacttgcatcatcaatacccatcgtaaaattatctccaattggtacaaaacatacatcaactggatgacgtttcgcaataagtgacatgtcactaaacagacctgtatcaccagtatgataaattgtttttccttcaacttcaaacacgatacccattggcatacctaaataaactggaataccattttcatgtgtaaaacttgaactatgaaatgcttgaacaaatttaacgcttccgaaatcaaagtttgctttaccaccaatattcataccatgaacattttcaacaccgtgatatgaagaaagatagtcagccatttctgcacttccaattactgttgctcctgttttctttgctagttccacaacatcaccaaaatgatcaaaatgaccgtgcgttaaaacgatatagtctacctgcactgtttcaatattcaaatcacacttagggttatttgaaataaacggatctacgataacctttttgttgttcccttctaaataaatcgttgattgaccatgaaatgataacttcatttgagcatcctcctatcaattactatataaatttagtacccttttgccacttaattataacaaattctcaaattttaaaaattgaaaatctagttaatgtattagctcgattttgaaatctaataataattggcataaaatggaagtaatattatgttgaggagtgtttataaaatgacaaaaatatcaaaaataatagacgaattgaacaatcaacaagctgatgcagcatggattacaacaccgttgaatgtatattattttactggataccgtagcgaaccccatgaaagattatttgcattattgattaagaaagatggtaaacaagtactattttgtccaaaaatggaagtcgaagaagtcaaagcatcacctttcacaggtgaaatcgttggatatttagacactgaaaaccctttttcactttatcctcaaacaatcaataaattactaattgaaagcgagcacttaacagtagcacgccaaaaacaattaatctctggtttcaatgtcaattcattcggagatgttgatttaacaatcaaacaattgagaaatattaaatccgaagatgaaattagcaaaatacgtaaagctgctgagttagcagataagtgtatcgaaataggtgtttcttatttaaaagaaggtgtgactgaatgtgaagtagtcaaccatattgagcaaactatcaaacaatatggcgtcaatgaaatgagttttgatacgatggttttatttggagatcatgccgcatcacctcatggcacaccaggagatcgcagattaaaaagcaatgaatatgtactatttgatttaggtgtaatttatgagcattattgtagcgatatgacacgtactattaaatttggtgaacctagcaaagaagcacaagaaatttataatattgtattagaagcagaaacatctgcaatccaagcaattaaacctggaataccattaaaagatatcgatcatatcgctagaaatattatttcagaaaaaggttatggtgaatatttccctcatcgcttaggtcatggcctaggattacaagaacatgaatatcaagatgtttcaagtactaattctaatttgttagaagctggcatggttattacaatcgaaccaggtatttatgtacctggtgttgcaggtgtaagaattgaagatgacatacttgtcactaatgaaggatatgaagtattaacacattacgaaaaataaggagtgggataaaaatgaaaagcttgttacaagcgcattctcattcagtcaaacactgccaatataacattgtagcgcctaagacataaatttttatccaagtctaaatgcaatatgtaacaaacaagctagaaacacatatgcaggtatgttcatcagtaacatgtaatgaatcaaatcaatatcattcatgttcgatgatttcttcgcattgtttctagctttaatttatcattatttaattttaataaccaaggagatgataacgtcattctttagtacgctgtaatccattcccttttcatcaaattcaaattataattgtaatgcttcttctacagatttatattccatttcaaatgcctctgcaacgcctttattggttacgtgacctttgtaagtatttaaacctaatgataatggttgatttgatttaaatgcttctctataccctttattagctagcatgagcgcataaggtagcgtagcattatttaaagctaacgtcgaagtacgcggtactgcacctggcatatttgcaactgcataatgaaccacaccatgcttaatatatgtaggatcatcatgtgtcgtaattttatcagttgtttcaaaaataccgccttgatcaatagcaatgtcaataataactgacccatttttcatttgtttaatcatgtcttctgttacaagtcttggcgctttagcacctggaattaaaactgcacctattactaaatcactttgtttaacatacaactcaatattcaacggatttgacataattgtatgtacacgtccaccgaataaatcatctaattgttgtaaacgctttggattaacatctaaaatcgtaacatctgcacctagtcctagtgcaattttagctgcatttgttcctgcttgaccaccaccgataatagttactttacccttaggtactcctgggacaccacctagtagaattcccataccaccattaagtttttgtaggaactctgcgccaacttgagctgacattcttcctgctacctcactcattggtgataacaatggtaaagatcggtctggtaactgcacagtctcatatgcaatactaattacttttctatctatcaaagcttgtgttaatttttcttcatttgctaaatgaagataagtgaataatacaagcccttctttaaaatatggatattcagattcaagtggttctttaactttaataaccatatccacatcccaaacttttgcttgttcagcaacaatctcagcacctgcttctttgtaatctacatcttcaaagaatgatcctgaacccgcatttgtttccactaaaacagtatgcccactttctactaaagcgtgcacaccacttggtgataaaccaacacgattttcattatttttaatctcccttggtataccaattttcataccatccacctccataatcatcttaacgcgaacattttgaaagcgcaatcaaaaatccacaaaattgtaaaggttattacactgacttttccgaaaattgtggtaaaatataattaagaaagaacaaggaggcacttactatgattacttacaaaaatattttaatcgcagttgacggttcacatgaagcggaatgggcatttaacagagcagttggtgttgctaaacgtaacgatgcgaagttaacaattgtgaatgtaattgattcaagaacgtattcttcttatgaagtttatgatgctcaatttactgaaaaatctaagcattttgcagaagaattattaaatggttataaagaagtagctactaacgctggtgttaaagatgtagaaacgcgtctagagtttggctctcctaaatctatcattcctaaaaagcttgcacatgaaattaatgcagacttgattatgagtggtacatcaggcttaaatgccgtggaaagatttattgttggttctgtatcagaatctatcgttcgtcatgcgccatgtgacgtgttagttgttcgtactgaagagttaccagcagacttccaaccacaagttgcaacaactcaattacgtgaaaaatatcaaaattaaatatagatgatcattagataactacttgatcattatgaaccaagtgcaactttctgcacttggttttttattgtttataaataaaactcacttaataatgttttcataatcttcttcgactacttaattctttaagatattcgtgaaaagagacattacactagttaattttcaaacaatacaaaaagcgtctacctcctacatataattgtagcggagatagacgcttaatatttatttaaaaattattttaaaccaccgaatgtcataacatcacgggcaatcatactttcttcatctgttggaataacgacaactttaactggtgaatgaggatagttaataaatccttctttaccacgtagtaagttttcatttttcttaggatcccagtaaacacccataaattctaagccttcaagaactttcgcacgaatttctactgagttttcaccgatacctgctgtaaatacgataacatcaacaccatgcattctcgcagcatatgatccaatatatttgtgaattttagaagcaaatacatctaaagccatttgtgaacgtgctttacctgattcagcttcttctgataagtcacgtaaatcactagatgtacctgataatcctaataaacctgattctttgtttaagatttccaatacttgttcagcagttttacctgttttttccataataaatggaattaaagcagggtcaatattaccagaacgagtacccattgttacaccagcaagtggtgtgaagcccattgatgtatcaatagatttaccgccatcgatagctgcaattgatgctccattaccaatgtgacatgaaataatacgtaaatcttcaattggcttatctaacatttctgccgctctttgtgatacaaatttatggcttgtaccatggaaaccatacttacgaatgccataatctttataataatgatatggcaagctatatagatatgctttttcaggcattgtttgatggaatgctgtatcaaaaattgccacatgagggatatttggtaataatttacggaaagcacgaatacccatcaagttagctgggttgtgaagcggtgctaattcgcttaattcttcaatttccttttcaacctcatcagtaatagctactgattcagggaatttttcaccaccatgtacaacacggtgacctgttccatcgatatcgttaatatcattaataatattgtgcgctttaaaagcatccaacatgatatcaactgcctcaacgtgatccttgatatcttgtactgttttaactttttccccgttgacttcaattgtaaaaattgaatccttcaatccgattctttctactaaaccttttgttactaattcctcttcaggcattctaattaattgaaattttaatgatgaactaccagcattgatagccaagattaattttgacataagtaatgatcctccatcgtttgctttttatactatttcatttttcattttatcattcatacagttttatgactatactattacagattattttttaggacgatttgtgtccatccactgatttaactctgtcataaatccttgaaattgtgaaggaattttgaaatcaggaatatttgccaataatacttcaactggctttgtttcacccgattttttcttttgtaaaattaatatagattttcgcgctttttcatttttaaataaagttggtggtaaatttaaaaatgcttgcatctctgtctctgttgcaatatatttttcaagctgttttacatgttcacctgtaaaaatattacttggtaccactagaaaggcatatccagcatcttttaatgcatttattgcttgttctattaataaataatgtgaataactatgtccttcttcaaaacctagcttaaactccttacttctttcatcaattggataatagcctactggaaaatcaccaataacgatatctgcttcttctaatggtagtggcatgatggcatcttgaggatacacatcgaaaggaatttctaagaagtttgctaaatgtacactaacacgtgataaaactggatcaacttcaattaaatgatgcataaccgcaatttcaggtaacacttcttttacagtagcacttaaatgaccggcaccacttgcaatatcaacaatatgtaattcttcttggttgttcataaaacgctcaactaaaaatcctagtatcaatccaattgaatctggtgtaatttgatgatttgcttgtatcttttcttcctgcattaaacttaaatatgcaaattggaatgctttacgtcgatcttgtaacgtcgattgttctaacaatcctctttcattggtatatacttgttccattgctagcccaagattttcaataaaactttggccattttcattatttaatgttttagctttttcatctaatgtatgaaacaagcgttccataattgtttgttgttctgccatattcgtccctctccaataaaaagtgcccataggtcttagcaatcatagaaaacaattctattttaatgctgttgacaacgatggacacgatgtatacattttaagatttatctctttaatgattaaatatttttgtatgcagctaaagcagcatcaaaatctgggaaatcagtaccttcactaacgatttctttataaacaactttattatctgcatctaatacaaatactgcacgagctaataagcgaagttcttccataacaacgccatagttttcaccaaatgataagtcacggtggtcacttaatgtaatgacattgtctaaacctgctgaagcgcaccatcttttttgtgcgaatggtaagtctgctgaaattgtaagcacaatcccctcttctttagaagcatcagagttgaatttgcgagtctgctgatcacaaacacctgtatcaattgatggtaccacactaattaatttctttttaccagcataatctgctaatgttacttgatttaagtcattatctaacactgtaaaatcaggtgcaaaatcaccttcattaatttgttgaccttttaagtggattggtccacctttgaatgttatttcagtcatatacttgacctcctgcattttaaaattctaactacatcatacgacaatttatggtttgattacaattttcatgctttaatcaaaagcaaatttaattttatacaaattgttgaatataatcaaaagcattttttaaaattaaaatagcagtaataataataaataatacttttacataaccaacaccttgtttaatagcaaaatgagccccagcatatgacccagcaatcatacttatagccataattaaacctattacataatctacttgtcctaataccataaataatacaagcgcacctatattagaagcaaagttcaaaactttagcatttcctgctgcacttaaaaaatcaaaaccaaagactaacaatacaaaaagcataaatgaacctgttcccccacctacaaatccatcataaaagccgattaatataaaaagtgctgcaaatattatggctttcttaaatgtaaattgagtaaacgtgcgtgtattgccccaatcttttttaagtaatgtgaatataaacaccgacgaaagtgcaatgatgattaaaggtttcaatatttgtgacggaaccatcgttgcaatatatgcgccacatgcagatgccaaaaatacaaaaccaaataatttggcaacaacatataagtccactttaccggaccttataaactttatcgtactagttaaagaaccaaacgaacttgccaatttatttgtacctaaagccacagatggtggtagaccgattgctaataatgctggcgtagaaattaaaccgccaccccctacaaccgaatctataaacgccgcgataaaaccaaataaaattatgattataatcatcgttaagttcaaatccatagtttaacatccccttatgtttaaatttactctaggattttatttataaaaagtcgtttattaattggtttgtttgctgttctttaatagttttataatcactagttatttcaagtgtttcaatattttcaacagcacgattaatcatctcttcaaaatcaaagacactttcatattggactaccttatcaaagtttggttcggttactggatttttaggggtgaaaattgtacaacaatcttcaaatggttgaatagatgtttcaaatgtaccaatttctttcgatttaataataatttcttctttatcgtaagttaataaaggacgtaatacaggagtagaagttacattattaattgcatacatgctatgaagtgtttgactggctacctgccctaggttttcaccatttacaatagctaaagcccctatttgatgtactaatttatcagcaacacgcatcatcatacgtctcgttgaagtcattgtatatcttggatgtacaactttatttacctgtttttgcaattctgtaaatggtacaatatgcaatttaattggtccaacacgttcagctaaaatacgtgtcaattcaataactttttcttttgcttgatcacttgtaaatggtggactatggaaatgaatcgcttcaattgttacgccacgtctcatcacttccatcccagcaactggtgagtctataccgcctgaaagcattagtaacgtcttaccaccagtaccaactggtaatccacctgaacccggaacaacttcttcatacatataaattgcatctaatctaacttccactcgaatttcatgatctggacgtttgacattcactgaaatattgtcgaagtgcttcaatactgcaccacccaattcacgctgtaattcatacgtatccattgggaaatttttatcggcacgcttcacatcaattttaaatgtgctgttttcttcaaattgctgcgcaaatttaattgccgctgcacttattgcctctattgttttttctacttttaatactggactaatagatttaataccgaaaatttttgataatcgatatgttatttcatttatatctgcatggtcttcaagttcaatatacatacgatctcgtttgcctttaacgacaaacccatcaagtccttttaatgacttatttacattatttcttaattgatttacaaatttctttctatttgaaccctttaatgttaactccccgtatctaacaagcaagtgatcatacttcattattttagcaactccttaatttcctcataaatgatgataaatatttctttaaacctcgctatatcttctttagttgtagtagccccaaatgataatcttatactaccttcaatagatttgtctgataatcccattgcagccaatacttcatttaatttattacgtttagatgaacaagcacttgtcgtagatatcataatgtcatattttgaaaaagcattaactaatacttcaccttttacgccaggaaaactaatatttaaaacgaatggtgaacctgaagttgaagaattaatataaactccatgatatttatttaaaaattgacggacgtcattatttaactcagtaacaaatgcattcaatgcttcaaagttttcattagctatcttcatcgctttaaccattgcaatatcatttggcaaattaactgttccacttctaacaccatattcttgaccaccaccatggacagttggttcaacattttgaatgtgatttacaagtaagacgccttgtccttttaaaccattaaacttgtgtccacttaaactaatactatctatgttattgagatccattgaaattttgccgaatgcttgaaccgcatctacatgaaaatgtgccttaggataattttttataactttagccatttgtggaataggctgtatttgtccagttacattatttacatacatacatgttactaaaccgactttgtctgacattaattctttgaagtgttctaagttaatactgccatctttctttacatcaacatatttaactttaaatccttcgtgtgcttccaaatatcttacaacctctaatacggacggatgctctaacacggatgtaattatttccttcgctgtatcaaatttacgataggcaataccttttaaagcaagattattggattcagttgcaccactagtgaatacaacatcataatttgtttttgaattaatcattgcattaatttgggtttttgcttgttgtagtaattgatttgcctgcaaaccagctttatgcggactattcggattataatacattgattgatttacttttaaataagtatctaacacttcttcaaatgctttcgtcgttgccgcattatctagatatatcaaaataaacacttctctttcattaatcatcaatcgttaaaattgttttactcaagcattatactattatccgacaaaaaataaaggttatagcgcaaaataatcttatttctacttattaaataagaattagactatttcactctatttaaacagctgtgtgattatgcttttttcactacttatattaattaaaacaacacatttgattacgtttatctttaaacaattgctatttatatttattgtccctttcatttatccatataaaaaagaagctagacaacgtatcgttggctaacttcaattattaaactcatcagtccaatttgacagagtgctcatattatttaagtataactacatactagtttctattgcttaataacttcttcttcaatatgtttagtaacacctggctcaacactttcaagagcttgctctgcaatttcaatcgcacgcttatagcgattatttttaaataatcgttcagcttcatttaagctcttatcaacattgctatagtccttacgatatctatttccatattgaattaatttctctgcataaacagcattaacaagaacatcatttgcttcatcttcaaatgtattcatttgaatcacaattttagacactttatcttttaactgtttaacgtgtattggacgttcactaaattgttcgttaacatcacgaacttcatgatcaatttcatttttcatgatgataaacctttcaggaacgcttgttaagttagaagcaagtaatcgacgatacacttcttctttcttcgattgtactcgtagcagattgtcttctgcttctgcttcatcttcacgcaattgaatcagatgattttgtagcttttcttgtttgtcattaataactgtgacatgatcttctaaatattgtaaattatcctgaacctcgctatatcgcacagcagatttagacatttcttttaaaatatcatcatatacagaaattaaactttgaatttcattttcaaattgacgaacactctgagcatcagattcatttatatagtagttttcacgtacatattcaatttctgtttgcaatgtataattcatgtctttagctttgaataagttatccgtaatgatatcttttgtttcttcgacatcatttttagctttaacttcatgttcaattaaatcatacatgtcatctaacttatcattgatattagctagtttatcattagcttcttctaattctaagcggctaattaatggttcaacgaaactaagctctgtttttaagctttgtaatgtactgtctactttcacgtgatccagatcatacccttcaactttaagatcacggcaaccatattttaaatcttggaattgaccaggtaattctttttgagtttctctaattaattctggtatttcttccatataagatcttagctgtttcatttgttcattcaaggcagctatatggttgtgcgcttgtacataattaccatcagcttttagtacttcatattgctctaaccttggctcaaatttttcaatttcagtttcaagtagacttgctgcctcaccaaattgatgacgatttgctaaaacatcacgtttcatttcacgataatcaaccttacatttgtcatataattcatcattatctttgtataacgcaataatttcatttacatcttctaattgttgctgatagctttgttcgtaactatccatcaactcatttgcatcatcaatttcactttgagatgcgttgaaactaaatttatctaataaagcctcagcattatggattttttcttccacaggagctagatacttatttgtactttctacgttgtcctttttcattgcatcgtatttcgtttttgtttcaccttttaaattcaacttagataattgtgcaaggttttgatcaaaaggtaacgtctcaatttcatttttacgttcgattgctttttcaataatttgtcgtttatttgaacgtaaatagaataatacacctacagcaatcaatataatcacaattattgccaaaatgatatataacaccatatgcttctcctcctaatttatcattactattataacgtaattttgcttaaggataaattataaaatgaatttattgccataatattttcgaaattctatactattataaaatctatgaaaataagaggttttaaatatgacaacaattaacccaacaaactacacattattaaagaaacaagcagcaagccttattgaagatgaacatcacatgattgctattttaagtaacatgtctgccttattaaatgataatctagatcaaattaattgggttggcttttacttattggaacaaaatgaacttatacttggacctttccaaggacaccccgcttgtgtccacattccaatcggaaaaggtgtatgtggtacagccgtttcagaacgtcgtacacaaattgtagctgatgttcatcaattcgaaggacatatcgcttgtgatgctaatagtaagtctgagattgtcgttccaattttcaaagatgataaaattatcggcgtcttagatatcgatgcccctataacggatcgatttgatgacaatgacaaagaacatcttgaagcaattgttaaaattattgaaaagcaactcgcataaaaggacatcagcattttcaataaagtgttgacagttagcaggaaaatgttacaataatctttgtgtgaattaacgaaagtagcagttgtatattattgagcgctatgttgttcccaatgcggacgtgtcacgtaactgtcgctataaggtgaagacacataaaacaatatatcttagtaagcatgcaacactcttttttgtttattcataacaacaaaaaagaattaaaggaggagtcttattatggctcgattcagaggttcaaactggaaaaaatctcgtcgtttaggtatctctttaagcggtactggtaaagaattagaaaaacgtccttacgcaccaggacaacatggtccaaaccaacgtaaaaaattatcagaatatggtttacaattacgtgaaaaacaaaaattacgttacttatatggaatgactgaaagacaattccgtaacacatttgacatcgctggtaaaaaattcggtgtacacggtgaaaacttcatgatcttattagcaagtcgtttagacgctgttgtttattcattaggtttagctcgtactcgtcgtcaagcacgtcaattagttaaccacggtcatatcttagtagatggtaaacgtgttgatattccatcttattctgttaaacctggtcaaacaatttcagttcgtgaaaaatctcaaaaattaaacatcatcgttgaatcagttgaaatcaacaatttcgtacctgagtacttaaactttgatgctgacagcttaactggtactttcgtacgtttaccagaacgtagcgaattacctgctgaaattaacgaacaattaatcgttgagtactactcaagataatacgttcaatacaaacacccacaattgtgggtgttttttttattaatttaaaaatgatagattcaaaattatatggagctaccctattttacaatcaacttagaatttacaagtcttatttgtttaattatctttagtatttcatcattagtttttaaaattatcaattgcgatatacgaatcctcatccctctatcaaattaccattcatcgtctcacttaataaataatttcggattatctgtaattaatccatctacacccatttgtcttaatttttctccagttttcaatttattaactgtgtatggcataacctgtaattgatgatgatgtgctttatcaacaaattttctggtcactaatgcataattaggattaacataactagcaatttgagcaattcttgaaaagtttggctttttataccaataattacgtttactacaaagcacacctaattcatatatactgcccaatgtgtttaacttttcgatgcattcgatatcaaaagattgtataactacttgtgtcgcatcgactttcttttcttccaaaaatgccagcaatttacattctatttctggatataaattcggacttttcaattcaatcaatagctttttatcatactttaagcataatgaaagtacttcatctaacgtgggtattcgttctcccttaaaagcaacatctttataactaccaaaatcaaatgattttaattgcgataatgtgtaatcagcaatacgccccttaccatccgatgttctatcaattgtttcatcatgtatcacaacaaaatgttggtctttggtcaaatgaacatctatttctaacatagcaacattgagccccattacctctcgataaccgaccattgtattttcaggaaaatcactcggcaatccacggtgcgaaacaatttgtaattcatctttcagtttattcagagtcattgataagtcacctttctgttaaactttgataaactattctaaaattaaactatcacaattatattggaggttaaagcaattgcatcaacatgactttaaagtccaaacttcttggcaaggtggtcgtaacaatgtcggaaacgttcaaggcgacatactttcagagaatatttctatacctgcttctttaggtggtgttggtataggaacaaatcccgatgaaatgttagtatcagccgcttcatcatgttatatcatctcattagcagctactcttgaacgtgcaaagttcacagatatttcaattgaacaacaatcgattggaacagcttgtttaaataacggaaaattcagtatgtcaaaaattgtgcaccatcctcaaattcaaattccaagtgatcaaatagcacaattagaaaagcgattaccaaaattgataacaattgcagataataattgcatgatttcaaatgctgtaagaaataatgtggacataaaaatctatcccatcattcaggccaaataaaatcgttaagtgataacgtttgttcgacaatatagcgttatcacttttttaggcttttaaattttcagaaaatttgctaaaatagtgaaatcttatttataggaggcatataaatgtattatcatcaaccgttgttattaacacctggcccaacccctgtacctgatgccattatgagagaaattcaagcacctatggttggtcatcgttctaaagattttgaagacatcgcacaacaagcatttcaaggtctaaagccaatatttgggagtcaaaatgatgtacttattttaacatctagcggtacaagcgtcttggaggctagtatgttgaacattgtaaaccctgaagatcacttcgttgtcattgtttcaggtgcctttggtaaccgatttaaacaaattgcacaaacttattacaaaaatgtgcatatttatgacgtaacatggggagaagctgtagatgtcaaagatttcatcaatttcctttcaactttaaatgttgaagttaaagcagtatttagtcaatattgcgaaacatctacgacagtgctacaccctattcacgagttaggaaatgccattaatcaatttaatagtaatatttattttgtagttgacggcgtaagttgcattggtgctgttgatgttgacattaacaaagataaaattgatgtacttgtttctggtagtcaaaaagcaattatgttacctccaggattagcttttgtagcttatagccaccgtgcaaaagaacatttcaaagaagtaactacgccaaaattttatctagacttaaataaatacatttcgtcacaagctgacaattctacaccgttcacaccaaatgtgtctttatttagaggtgtaaatgcatacgttgaaaccgtaaaagcagaaggtttcaatcacgtaatagcacgacactatgcaattagaaatgcattaagaagcgccttaaaagcattagatttaactttattagtcaatgataaagatgcatctccaacggttacagcattcaaacctaatacaaatgatgaagtgaaaataatcaaagatgaacttaaaaatcgctttaaaataacaattgctggtggtcaaggccatcttaaaggtcaaattttaagaattggtcatatggggaaaattagtcctttcgatattttatcggtagtatctgctttagaaattattttaactgaacaccgtaaagttaactatatcggtaaaggtatatcaaaatatatggaggttattcatgaagcaatttaatgtactcgttgcagatcccatatcaaaagatggtatcaaagcattattagatcacgaacaattcaatgtagatattcaaactggcttgtccgaagaagcattaatcaaaattataccttcataccatgctttaatcgttcgtagtcaaactacggttactgaaaatatcataaatgctgctgattctttaaaagtaatcgcacgcgccggtgttggtgtagataatattaatattgatgctgcaacattaaaaggtattttagttattaatgccccagatggtaatacgatttcagctactgaacatacactggcaatgttattatcaatggcacgaaatattccgcaagcacaccaatcacttacaaataaagaatggaatcgaaatgcatttaaaggtactgagctttatcataaaacattaggtgtcattggtgctggtagaattggtttaggtgttgctaaacgtgcgcaaagtttcggaatgaaaatactagcttttgacccttacttaacggatgaaaaagcaaaatctttaagcattacgaaggcaacagttgatgagattgcccaacattctgatttcgttacattacatacaccactaacacctaaaacaaaaggcttaattaatgctgtcttttttgccaaagcaaaacctagtttgcaaataatcaatgtggcacgtggtggtattattgatgaaaaggcgctaataaaagcattagacgaaggacaaattagtcgggcagctatcgatgtgtttgaacatgaacctgcaactgactcgcctcttgttgcacatgataaaattattgttacacctcatttgggtgcttcaacagtcgaagctcaagaaaaagtggcaatttctgtttcaaatgaaatcatcgaaattttaattgatggtactgtaacgcatgcagtgaatgcacctaaaatggacttaagcaatatagatgatactgtaaaatcattcatcaatttaagccaaacagttggtgaattagctattcaattaatgtacaatgcaccaagctctattaaaattacgtacggtggcgacttagcctctattgatagtagtttattaacacgtacaattattactcatattttaaaagatgatcttggtcctgaagtcaatattatcaatgctctaatgttgttaaatcaacaacaagtgacattaaatattgaaaataataaagcagagacaggttttagtaactacttagaggtagaactatcaaacgatagcgattccgttaaagttggcgcttctgtctttacaggtttcggtccaagaattgttagaattaataatttttctgtagacttaaagccaaatcaatatcaaattgtgtcatatcataatgatactccaggtatggtaggaaaaactggcgcattgttaggtaaatacaatatcaacattgcatctatgactttaggtagaactgaagcgggcggagatgcgctaatgattttatccgttgatcaacctgtttcaaacaatataattgatgaacttaaacaagttggtgaatacaatcaaattttcacaactgaattgacggtacagtcataaacaatttatgtaaattcaaaatgccaagaagacattggattacttccattgcttcttggcattttttcattattaatttcattgtaactcaatatgaaacctttggttcaatcattcactacaagttatgctgtcaaacaacaatcaaattacaaattatctagtacacctctaagttcacctaaatgattaataacatagtcggcatgatgcgcttctaactcacctgcagcatccttaccttttaaacctgttaatgttccaataaacgttgcacctattttttgagcacttaataagtcagctaacgaatcgcctactataaatacgtcatctttatttacaatgttatcttgcttattgatataagattcatatttatcgcgattattaccatataaagctgcgatataactaaaaggattcggctttcctaatggtcgtgcttgcggatacatattctctgcttctaaaacatcacttgctgttgcaataaaatcagcttcaaaatatggtaacaatcctaaattttcaaatggcacaacagtctcagtataaggacgacctgttgcaatacctaattcgaaaccagcaccttttaaatcattcagaagtaccttaacttcatctactggtctcaaaataatttcttgataaatataacctgtcttaaaagtagttcgtgctattttcttttcaacatcttcatacaacttcgatcctaaataccattcttgataaacttcttgcgctaacgtccataatgcacccttcaaactaaataaagtagcatccgaaacatgtaactctgttgttgcaaactcttccaaagcagcataaatattatttttaccaacttttacattatccaaaaattgtaaaggtagttgttcatttaaattaaaacagtctgctaagtttgtgcttatattttgcaacttcaattcgacaggctcatcttgatacatgaatgcctcaatttcatcatgtgataactttttcaaaatatcaattaaatgaatactaaaaacgataaataacatatcccaatttgaattcagccctagcgattttaatttgtttaaaatcttatctttttgaaaaattcgattcctaatgtcttgtatatcgttatcagtcaaagtttcccaatctatatgtgaatgaagacctaaataacacttatccattaataattcatataccgttaatgcagagacatcgaaacaacgttcttcacttaaaaaaacgccatcaacatcaaataaaattttcttcacaatccccactccatttctgaaaattcagatataaatcattctactatttgactaaaaaaagcgcaaaccctattgaagttagatttgcgctttagctgtttaaattttataaatgtttttcaatttcatcagcaacctgctgtacgtgtgtaccgacaataacttgagttgaatgtttgccattaacagtaacaccaactgcaccggcgtttttaatcttctgtttatcaataatagatgtgtcttttaactctagacgcaaccttgttgcacaattggttaaattaacaatattctcttgaccgcctaaaccttctaatatttgtatagcatgttgatgatatttactttgtttaatatcattttcaccaggagcaatattatcttttacaactgttgggtcaactaattcattttcacctctaccaatcgtattcaagttaaatacttggattactacacggaaaatcacatagtataagatgaaaaatacaacaccttgaacaagcaacatcaatggatgatttgatactggattaattagtgataacacataatctatcaaacctgcactaaatgaaaatccagctgtccaatggaatgtagctgcgataaataaagataatcctgttaataacgcatgaacaacatataagattggcacaacaaacataaatgcaaactcaatcggctctgtaacaccaacgaaaaatgctgcaactgaactcgctaggaaccaaccgtaaacttgttttttctgagtagttttagctgtatgatacattgctaacgcagccgctggaataccgaacatcatgattgggaagaatcccgcttgatagcgtcctgtaataccttttatagcatctttgccactttggaatttaccaatatcattaataccaatcgtatcaaaccagaacacactattcagtgcatgatgtaatcctgtaggaattaataatctattggcaacaccatatatgaaagctccaaacgatcctaaaccgactatagattcaccaaattttacaatccatgaataaagtagtggccataagaataacaatatgacaactaaaaatgtacagtaaaatgcagtcataattggaactagacgtttaccactaaaaaatgataatgctaatggtaattctgtttcactaaacttattgtatgcataagctgctattaaacctattacaataccaacaaagacattgccattattcatcttttcaaaagctgaatttatttccgaagctttcattcctaataaaggcgctaatttcattggtgataatacaactgtaactaaaaaatatcctaacgtagctgcaagcgcgactgcaccatcatttttctttgccattcctatagctacaccaattgcaaataaaatacctaattgctctaaaatcgtagtacctaccgtagtaaagaacattgcgattttcggcgtcgcatgaagtgcatttaacgtattaccaattccggcaataattgctgcagccggtaaaatggcaactggtaacattaacgaacgccctaaattttggaaaaatttatacattgaatgtcatccttcttaaaataatgtagaaatataaagattactaatgtaactagaataactacttcgatactccgttatagtcacctaggcttactaaccagctatatttctacctcaagttattttataaactttttacaatttcatgcaattcttgttgtaactttgctgttcgtgtttcaatctcttttgtaatataatcgatacgctcgtttcgttttaaatctttaggtaaatcgttaatatcgattggtttgccaatatttatgtatgcttgtcctgttaaaagaccgtgaatcttagtaggaccaacataagcaacaggtaatattggtgacttacttaacattgcaattgttgaagcaccacgtttcaaaggtgcaccttcttgcgatgtgcgagaacctgttgggaagataccaactgtcttattatctttcaacaaattgattgggcgttttaaagtactaggtcctggattttcacgatctacaggaaatgcatttaaagacgttaaaaatttaccaatccatttatttttgaataattcttttttagccatataatgaatttgattaggatataatgccatacctagcataatgacttcgttataactttcatgcgtacaagttacgacatatttactatccttaggaatattatctttaccgattacgtataatgattttgacattttaactaaaatgaaattcaaaatcttactaatcactgaatacattgtgccacctacttaacttatttgtttataacaactagattttatcactatatttttactagaacaagatagtctgaaaatacatctaaagttgtatagtgcattactagcaataattataaaaaaaagacataattaaagcatatataaatcatataatggaggttaagtatgtcagattttaatcatacagatcattctacaacaaaccatagccaaacacctagatacagaagacctaaatttccatggtttaaaacagtcatcgttgcattgattgctggaattattggtgcacttctagtacttggtataggcaaagtattaaatagtacaattttaaataaagatggttcaactgttcagacaacaaataataaaggtggcaatcaattagacggtcaaagcaagaaattcggtaccgttcatgaaatgataaaatctgtctcccctacaattgttggagttattaacatgcaaaaagcatcaagtgtagacgacttattaaaaggcaaatcatctaaaccatctgaagctggagtaggttcaggtgttatctatcaaataaacaacaattcagcttatatcgttacaaacaatcatgttattgatggcgcaaatgaaattagagtccaattacataataaaaaacaagttaaagcgaaattagttggtaaagatgcagtaactgatattgctgtacttaaaattgaaaatacaaaaggtattaaagcgattcaatttgccaactcttcaaaagtacaaactggcgatagcgtattcgcaatgggtaacccattaggattacaatttgctaactctgtaacatctggtatcatttcagcaagcgaacgtacgattgacgctgagacaactggtggcaatacaaaagttagcgttcttcaaacagatgctgctattaacccaggtaactcaggtggcgcattagtagatattaatggtaatttagttggtattaactcaatgaaaattgctgcgacacaagttgaaggtatcgggtttgctattccaagtaatgaagttaaagtaacaattgaacaacttgtaaaacatggtaaaattgaccgcccttcgattggtattggtttaattaatttgaaagatattcctgaagaagagcgcgagcaacttcatactgatagagaagacggtatttatgtcgccaaagctgatagtgatattgatcttaaaaaaggtgatattattacagaaattgatggcaagaaaattaaagatgatgttgatttaagaagctatttatatgaaaataaaaaacctggtgaatcagtcactgttaccgttatccgtgatggtaaaacaaaagaagttaaagtgaaattaaaacaacaaaaagaacaaccaaaacgtcaaagccgatcagaacgtcaatcacctggccaaggcgatagagatttctttagataatttacagacagaaaagtacattaagagcctactcattacattcttaggaatgaatatgagtaggctctaatttatttagctatgcaattatatttattgatagttaaccatgaagtattttttcttaccgcgacgaataatcgtaaattcgccatcaattttatcttctggtgctaaagcataattaacatcttgttgtctctcaccattaatataaatcgcaccattgttaacatcttcacgtgcttgtcgtttagaaggagaaatgcctgtttcaataaggacttcaacgatatttgttgtgtcatttgataatgtcacttgaggcacatctttaaatccatcttttaattctttcgctgataatgattttaaatcaccactaaataatgcttgtgaaatacggattgcatcatttaatgcatcttcaccatgaataaatttagttacttcttcagctaatgttttttgagcttcacgtaaatgcggtgcttcatttttagattgttctaagcgatcaatttcttcttttcctaagaaagtaaagtattttaagaatttaattacatcttcgtctgattgattaatccagaattgataaaattcataaggacttgttttttcagcatctaaccaaacagcacctgactcagacttaccaaatttcttaccatctgatttagttacaagcggaatagttaaaccgtatgcgtctgtttgaccatacatacgacgcattaattcaataccacttgtgatattaccccattgatctgatccacctacttgaatcttacaattcaattctctattcaaatgaccgaaatcaatagcttgtaaaatcgtgtatgtgaattctgtatatgaaataccatgttctaaacgactttggattgaatctttacctaacatgtaattaacgccgacgtgtttaccatagtcacgtaaaaaactaattaatgagatttgtcctaaccagtctctattattaacaagcactgcaccatggtctgttccaaattcaaaaatattgtgcatttgcttactaataccttcgatatttttatctacttgttcttctgtttgtagcacacgttcttctgatttacctgatggatcaccaatcatacctgtaccaccgccaattaaaacgataggacgatgtccatgttcttgaaaacgtcttaatgttaagaatggtagtaagtgaccaatatgtaaactatctgccgttggatcggcaccgcagtataacgtcacttgttctttatttaataaatcttcaataccttgttcatcagtttgttgataaataagacctctccattttaaatcttcaattaatacattcgtcattattatttcctcctatttataattatttattgaatacttgttaaaatactttaaagttttttgaacgtaaaaaaaacccttacaacaaatatgtaagggcgcgattgcacgttaccaccaaacttaaacataatcataagataatgttcactctattaatgatacgttcattaataaacgtaggacatgttagttataaaggtgtattcatattattaaaaacactagttcacagcgaccactagctctctgatgatttcaaataatattacttgtccttttatcctattctttatgcattttccctaattataattaacgttaaaataaaagtcaaattgcttaaatatggtatactatacgtaatttaggaggttaaagatgacgaatcaagacaacaatcatcaattgaatcatcgtatatatcattttgaaaagatatataaagctatcaaacatgtcattgtttttatatttatgattttcattgccatcgttgctatcgctgtgattgcgatgtctttatattttcatcatttaactaaaacgtccgactcattatcagatgatgctttaataaaaaaagttcgacaaatacctggcgatgaattattagatcataataacaaaaatttattatatgagtataaccattctcaaaactcactcattataggccctaaaacatcaagtccaaatgtcattaaagcattaacgtcatctgaagacactttattttataaacatgatggcatcttaccaaaggcgattttaagagcaatgatacaagatatttttaatactgatcaaagttcaggtggtagcacaattacacaacaacttgttaaaaatcaagttcttaccaacgaaaaaacatatagtagaaaagcaaatgaacttcgcctagcaattagattagaacacctactctcaaaagatgaaattatatatacatatttaaatatagttcccttcggtagagattataatggcgctaatatttccggaattgcatccgcttcatatagtctatttggtattccaccaaaagatttatcaattgcacaatctgcataccttatcggtttgttgcaaagcccatatggctatacaccctacgaaaaagatggaacgttaaaatcggataaagatttgaaatatagtattcaaagacaacattatgtattaaagcgtatgttaatcgaagatcaaatcactgaaaaagaatacaacgacgcattaaaatatgatattaaatcacatttgttaaatcgaaaaaagcgttaattgatgctcactttttaaagtaaccacaacaatgaatccaaatattaaaaacagcagtaagattattttcaattagaaaatttctcactgctgttctttttatttactctaaaggaaagccattaaaccaatcaatagtttataaattaattgctttcacattgtctacaaagttaatcatacatatgctatatttagttaattatttagattcttttctgaatttaggaatgaataaagctaacatacctaataacgcatataagccccaccatgattggcttgaagttgtttctccagtttttggtagcattttagattgactaagtttgttttctttcgatggtgtgccggctttttcttttgttttcactgttttatctacagttttatgaatatcactcggcagatgttcagttgtttttttgtcagtaactttgtctgtattattataattttgtttcactacgtcaagctttgctgcttttccagtatgattatttttatcggcaatatgattcagctgtatgactttgtctttatttttattagagtctttatcagtatcgacattagatgacataccaacgctattatcggcatctttatccacatttctatcagtatctttggcaatttgagtatccatttcttttaaatcatatttatcgaagtgattattatccgacatatcggataaatgatcaacatcatgttgcacatctttatcaatattattatcagcatctttaaccacgtcagactctggttctatcacatctgctttatcagacgcatctttaggatttgttgcagtgctgctattttcagctacatctgtatcagcaaccttaccttcttgtcctgtttgtacatttagcggttcactcgtgttattttgtgatgtatcatcatcttttgtattgatatcctgatttataattctgacatgatattgaccttcataaccaatgtttgccacaacgactttaacaatcgcattgtaaactgctttgtcaggtatatatgggaaaatcagcgttctagaattatttttaggatctttagaaacagtagtgacacgtttaccttctacaattaaatctttccagtaactgtcatcctttgttttcatcactacatatttttgaccatttaaagttgctgtatagaatggatgttcaacaaagccgtccataactgactcactattttcttcactttcaaaaacaacaaaatgcgcttcttgtaaatctgttaattgatcatttgtaggtgtaacattttcaaattccgtcactgctgatttaacttgatcagctaactctactctagtttgatctaatttctttttatattccgccttatatttttctggcaatttctcttgtaatttttctaattcataaacttgtctttctaacgttttagctttgtgatacggagctaataatttttgtaaattgtatgtttcttcatccacatagtcgtctgggttattagtaataggctgtgcaaagaccattagcgtataatcatagtcttcatggatgttctcaccatattcaatagatgacacaattttaacttctctcgtaccattagatactgggaaacgaatataggcataatctttatcagaatcatatgatactaattcgactggtaactttttgtcaccttcataaacttcaaatttcttccatgttgaagctgtctttaaacctaattcaattattggtcctgtttttgtaaaaatgacagttgctggttcaacagtactagcataatgatagaactgtctttcacctttatcatttttcatttgaaaatcaattggtcgccaattatcagctgtatgttctttatcgatgatagccgggtttttaattgcatcttgtagtgattcatctgctggtggatactgttgattaacatccgactgattacttgactcattcgttttatcgttagtattaccattagaatttgtttcatgagctggttggcttgacgcttgatctgcattcgttgacgattttggttgtgcaggttgactcatattggtcgttgcctgcggttgattattagcattgttgatcgttgatatattttgattagatgtattcgtgtttgtttgattacttgcgactgaacttgattgatcattcgttactactgcatcatttgtatctgattttacaagtgaaggatcgttataaataggtttagcaaatactaatttagtataatcataatttgtttcttctccatcatcaatttgagtcgaagaaacaattttcaattcttgtgtgccatctgaaactgggaatcgaatataggcatggtcttctggtacaggactatatgatacaagtctcactggcaatttttgattgttttcatagacttcaaacttcttccatgttgaagcagtattgatgtctaattcaacttctgctttctttttagtgtaatacacatctgctggatctttgatgctgaaaaagtgatagtactgcgtttcattgtttttatctaataactggaaattgacttgttctcttggacctatatcatgttctttattttctaatgcaggatctttaattgcatctttaagtgattcatccgctgcaggatagtttttcgcagtgtttgctggttgcgtagcaggttgtgtttgatttgtatccttaggtggctgagttgtagttgcattattattttgattttccgagattttatctgaagtatttgtattttctgctgcttgtgcttgatgttgagaagtaattaaaaatagtgtactgacaatgaccgatgcaacgcctagagttgattttctaatagaatagaaagaccttaattttgggtgatgtttgttcatgttgttaacaactcctataagattatatttaattgataataattatcaatatcaattattagtgttaattgtagcgcatcccaattaaatattgcaacctattttattaattttttttaatatggaatattcattgcatcgctttcctattcttcaagcccactttttatcttcatatacattaattaaccaccttcaaacattgtcgttagattcgccaaattgaatctatttttagcacagcaaaaaaccgaactgctgaaataatgcatctccaacagtccggtctattaaactatttacttatctttattaaacaattgacatgatttattagaataacccaattgcatgaccatcatcagtaacatccatgtttaatgctgctggttttttaggtaaaccaggcatagtcatgattgcacctgtcaacgctacgataaatcctgcacctgttttcgcttctaattcacgaattgtaatttcaaatcctgatggtgcacctaacaacgtttgatcatctgagaatgaatattgtgttttcgccatacatactgggtaattatcccaaccattttctttaaattgttttaattgtttttgcgctttactgctaaacgttacttttgaaccgccatagatttcagtcacaatcttttcaatcttttgctctaatggtaattctaattcatataaaggtttaaatgaattaggttgatcaatgacttctaatacttcatttgctaagtcaacgccacctttaccacctttttcccaaacttcagttaaggcaattcgtacgttattttctttagcccaagattttacatattctacttctgcatcggtatcatgtataaatgcattaattgcaacaaccggttctacaccgaattttttaatattattaacatgacgctctaaattaacaattcctgcttttactgcttctacattttcttcttttaaattatctttcgctacaccaccatgcatttttaacgcacgaattgtcgcaacaacaacgacagctgccggatcaaatcctgcttcacgcgctttaatgtccatgaatttttcagcgcctaagtctgaaccaaatccagcttccgttacaacgatatcagctaaatcacgtgctgtttcagttgctaaaattgagttacaaccgtgtgcgatattcgcaaatggtccaccatgaactaatgcaggtgtcccttcaattgattgtactaagtttggttttattgcatcttttaaaatcattgcaagtgcaccttccacttttaaatctgcaactgtaactggcttgcgatctctagtgtaaccaatagtaatacgactaattttatcttttaagtctttaatacttctacttaaacataaaatcgccataatttcagacgctactgtaatattaaagccatcttcacgtggtacaccatttgtaggtccacctaacccaacgtttacatgtctaagtgcacgatcattcatatctaatacacgtttccactcaatacgtctttgatcgattcctaattcgttaccttggtgaatatgattatcgataaacgcagacaatgcattatttgcagttgtaatcgcatggaaatctccgttgaaatgtaagttgatatcttccataggtaagacttgcgcataaccaccaccagtcgcaccacctttgataccaaatgttggtcctaaagcaggctctcttaatgcaaccataacgtttttatttaactcatggaatgcatcagctaaaccaactgtaaccgttgatttaccttcaccagctggtgttgggctcatcgcagttactaaaacaactttccctttgttttctcttggcgtaattttattaatgtcgattttagctttgtaatgaccataaggttctaatgcatcctctgaaatacctactgatgcagcaatatccttaattggttgtagtgttgattgattcgcaatatctaaatctgataaatgagtcaacttttttcgcccctttttgtttaatttatgcatttataatatgtaagttgtagctaagaaatttttacttacattcatataataacgaactgttaaaaacttgtcgactaaatcgggttagcgctttcatttttgcaataaattcacttattaaagttttgtattatacaacttttagcgcttgatactattgataactatatttttctattatttaaaataatcatcttccaaagatcatattaaaaataaaaagcaatataaagatatgccattattgttatgtcatcattttcaaatgctttctacgaaatgatatgacacaagttaacagttctttatattgcttatcgtaaagtaaacgattatttaaacattgacatgaaatatgttgtcaccctttattcttcgaaaaaaatcttcaataacattcatgtcattattccattgtacttaaatccccagcatctaaatttaattcccaagcttttaatacacgtctcataattttacctgaccgtgttttaggtaatttatctttaaattcgatttcacgtggtgctgcatgtgccgacaaaccttctttaacaaatatacgaatttcttcttttaattcgtctgttggttcatatccttttctcagtgcaacaaacgccttaattatttcaccgcgaaccggatcaggtttaccaataattcctgcttcggcaactgcttcgtgttcaaccaatttagactcaacctcaaatggtccaactcgttcaccagctgtcataattacatcatcaacacgtccttggaaccagaagtaaccatcttcatctttatatgccgaatcaccagatacataccagtctccaataaaatatgatttatatttttctggattcttccagatacgatacatcattgatggccagcctttttttatagcaaggttgcccattcgatttggtggtaattcattccctgcatcatcgataattgcagcttgaataccaggtaatggtttgcccattgagccaagcttgacgtccatcgttggatagttaacaatcatatgtccacctgtttctgtcatccaccaagtatctaacaccgttaaaccgtatacttttttcgcccattttataacttcaggatttaaaggctcacctactgatagaatcgaacgtaacgatgacaagtcatatttctcaacaatatcgtcaccagcactcattaacattcttaaagctgttggtgccgtataccaaatcgtcactttaaaatcttcaatcatactataccactgttctggcgaaaagcgaccaccagctatacaatttgtagcgccatttaaccatggtgcaaaaataccataagatgttcctgtaacccaacctggatctgctgtacaccaataaacatcatcttcttgtaaatctaatacatattttccagaaatatagtgcactaacattgcttgttgaacatgcaatacacctttaggttgcccagtagaacctgatgtataatgtaaaatcaaaccatcatccgactttaaccattcaatgtcaaattcatcgctagcagtttccatcaaactaatgaagtctatgtaattgtcttctacatcctcatctacgacaacaatttttttcaagtttggtaatttatctacaggtactcgaggtaacaatgccttattagtaattaacactttagcttcactgttctctaatctatccgcaactgccttttccataaatgcttcaaataacggcccaacaattgcaccaatttttaaaacacctaacaacgcaaaatatagttcaggtgtacgcgacataaatataaatactctgtcacctttgtcaacttctgcatgttcagacaaaacattcgctgctttattagataaccgttgcatatctttataagtatacgattcttttctgtgctcatctttgtaatttaacgctattttatcccctaatccttgatctacatggcgatctatgcattcatatgccatgttcatttttccagtttcactccaagaaaatgcttgttctacgtctttccaatcaaaagtattatatgtttcttcataatctttaaggttatgtttaccttgcgctcctttataaacttcgactttcatttgaaactccccctttgttatgtgaaaacgctttctttctcaatattatacataacatttctaattattcaaaatttttacttttatcctttttctagtattaattattgtaaattttctatataatgaatttaatacaatcacgacgtcgattgaggagttgaaaatatgaatcatttaaagacgtatcaatccgaagattattacattcatgacaagcaatttgttattgaaggtcctttaacacacgaagatttgaaagcgcttactttcgatgcgcatttaaccgcatttagagatgctgaagatcagtataaagctttgttagaaattacaacattaccagaaggtagaatttatgttgctcgccaagatcaactcattgtgggttatgtcactttccactatcctgatgaaattgagcgctggtctacaggtaagcttccatatttaatcgaattgggggcaattgaagtcagcatcaattttaggcaattacaacttgcagaaaagctgatacaacttagcctttctacaccagaattcgagaattatatcgttataactacagaatattactggcattgggatttaaaaaattcaaagttagatgtatttgactataaaaaattaatgcagcggttaatggcaactggtggacttgaaatattcgctacagatgatccagaaataacaagtcatccagctaattgtttaatggcaagaattggcaaaaacattacattagaacagcaacaagcgtttgatgatattcgttatatgaatcggtttttcttttaatttttggaatatcggagggattatatgcaacaacattcatcaaaaactgcatatgtttattcagataagttattacaatatcgatttcatgaccaacatcccttcaatcaaatgcgtttaaaattaacaacagagctacttttgaatgcaaatttattgtctccagaacaaatagtacaacctagaattgcaacagatgacgaattaatgttaattcataaatatgattacgtcgaagctattaagcatgcttcacatggcattatcagtgaagatgaggctaagaaatatggattaaatgatgaagagaatggtcaatttaagcatatgcaccgccatagtgccacaattgttggaggcgctttaactttagcagatcttattatgtcaggcaaagtattaaatggttgtcacttaggtggtggtttgcatcacgctcaacctggtcgagcaagtggtttttgtatatacaatgatattgcaattaccgcacaatacttagctaaagaatacaatcaacgcgttttaatcatagataccgatgcacatcatggagatggtacacaatggagtttctatgccgataaccatgttactacttattctatccatgaaaccggaaaatttcttttcccaggctctggtcactatactgagcgcggtgaagatatcggctatggacacactgtaaatgtcccacttgaaccgtatacagaagatgcatcatttttggagtgttttaaattaacagttgagcctgtcgtaaagagttttaaacctgatattattctaagcgtaaatggtgtcgatatacattatcgtgatccactaactcatctaaattgtacgttacattcattatatgaaattccatattttgtaaaatatttagctgattcttatacgaatggaaaggtaattatgtttggtggcggaggctacaatatttggagagtcgtaccacgtgcatggagtcatgtattcttaagtttaattgatcaaccaattcaaagtggttatttaccgttagaatggattaataaatggaaacattattcatctgaattattacctaaaagatgggaagatcgtttaaatgattatacctatgtcccccgcacaaaagaaattagtgaaaaaaataaaaaattagctttacatatagcgagttggtacgaatctactcgtcaataagtaacctaatctgcaacgattttaaaagataaataaaaggcattcttccaacacccatataatttgggtcgttagatgaatgcctaattttgtgaatttattttgtagttcctcggtattcaattctgtgaggtaaaactacatttggttcttctatcttttcatcgttcatatattttgttaataagcgcatccctactgcaccgatatcatataatggttgaataacactagaaagttgtggtctaaccatctcaactaatcgtgtattattgaaactaataatttgtaattcctctggaactttaataccagcatccattgcactatgcataataccaattgcttcttcgtcgctgatacataaaatggcatctggcaaattgcctttcattttggcaaaagcttttacgccttctttataactttcagcaccagaacaattcaatgtatcacctaattgaaggccatttttatttaacacttcagttaaaccttctaaaacatcttcttgagcttttttagaatgttctccacctactaaagcaaatgatttagcgcctttttcaattaattctcccgtaatttctttcgcagcttcagtaaaatcaatattaactgatgctatatgtgcatccttaccatttgttcctgatactactacaggtacagatgattgatttatcaattctttcatttcttcagtaattgtaccaccaaggaaaataataccatcaacctgtttacttaataagttattaaaaatttctttttccttttcaggatcgttatctgaatttgaaataattgagtgatatttatacattgttgcaatatcttcaagtccacgagcaagttgtgaataatagatattagatatatctggaatgatcacacctactgttgttgtctttttactagctaaacctctagcaacagcatttggacgataattcaaacgcttaatgacttcgttaactttatttttagtttctgctttaacattttggttcccattaacaacacgcgacactgtggccatagagacacgcgcttctcttgctacatcatatatagtaactgtcataatttcctccttgtaaacgttttattcattataataacatgttttcatttcattttcatagtttaccatattttaatttacagtaacatatttttgtttggaaaaatttagcgaaaagcttgaaataaaaacaaacgctaaatgataacgaacgatatattttaattttatataaacttttttcatttttaattgtaatgttttgagaaagccttttcaaatatcaattgcatttgttgaaaaatgttcacatttcagcaacaaatgtgtgaatctattatattttacagataattcatagttataattttaattactgctatcagtcataatctttaataattgtgaaattgaacaagtgtcgaagtattataacaatcgttaagtgcagtatacctttatttctatacaaaaaataatagccactctaaaagtaatatactcttagaatggctgtaagtttaaaattgtcgattcaaagataatattctacttcaacatgacatattagttaagtagtctatagtttccttggaatattattttaactttttagcgttatataaatcagctaaaggctttaattcatcataaaatgcttggaattcatctaaatccatttgttgacccgcatcactaagtgcaacagatggatctggatgcacctcagccataactccatcagcaccaactgctaatgctgctttcgcagttggtaacatgatatctttacgacctgtactatgcgtaacatctaccatgactggtaagtgtgtaccttgttttaaaattggtactgctgaaatatctaaagtgttacgtgtcgccttttcataagttcggattccacgttcacataaaataatgttttgattaccttgtgaagcaatgtattcagctgcataaacaaactcttcgattgtagcagataaaccacgttttaatagaataggctttttcgtacggccagcttcttttaataactcgaagttttgcatattacgtgcaccaatttggaatacgtctaaatactcatcagccacttcaaaatcatttggatttacgatttcgctgacaacatttaaatcatatttatctttaatctgtttaagtattttaagtccttcaacacctaggccttggaaatcatatggtgatgtacgtggtttaaatgcaccgccacgaataaatttttcacctttagcatgtaagtttttagcaacagcttcaacttgttcaaatgattcaactgaacatggcccaaatacaaatgatttattgccgtctcctataatgcccccattatcaaatgttacaatcgtatcttcaggtttcaacttacgtgatacatataaatgtttttcattttcagatttttgtaaatctgtagaggctttgaaaatttctttaaataattgcttaatagtattatcgttgaatggtcctttgttactatcgattaagtcgttaagcatttctttttcacgttgtggatcataaatacgtgtaccttgttttaatttttcttccccaattttttgtgctagttcaccacgtttagataataagtctaaaatttgatgattcagtgatacaatctcacttctgtatgattctaatttattactcatccttactcacctctactaattatttcaagtatattccactttaaagcaataaaatataatgttaaaaaatattctaacaatatcatatgtatagttcaaccctaaattgacagaaaataatcaattttctaattatatgattcgagactgacatttcgattttctcagtcattattggaaagttatattctatattgatatttattagcaaatgttaatcaattaaataagtgtcattattatagcttattttgagtcaacattactgcttttaagaaaaattttcgtttctatcttctattataaatctaaaattctcatacattcaacctaacgcttaataaaaattaacaacctttgtctttgtatattaatataaatctatagtgaacatcactcaccaacacattcagctatatttaaattagtgaacgtcattgtaccttctaaaattcattgtttatttgattatcgaatatttttccatcttcagcttaaaatgtgcaatatcactattgttatctaacgatgtttcaaacaacataaatacatgaaatgatcgcattgcctttcaaaataaactgatgatatcaaaaaaggtaagcacctgaatgcctaccttttattttgaaattcaatttttaaaaatatattacatagcttactgctatgattgattattcaacgattttagtaatcttagtcattgaatgtacgtttctctattttacttttagctttctcaactttagcatttggcgtttttgatgcattggatgatttagcatttgttgtttttgaattcttattactagtttgattattcttttgagttgacttacttgaactactttgtttctttgcaccttgtgatgatttcttattatgttgctttttctgacctgaagttttatttgtagatgcttttgatgcatttcgtttatttgaaggtgttgtttttttagattgtttacctgatttcttgtcaacagctgtattattagttgttttttcatcagctttacgtgtaataacaccattttcaaatttagcttctttttgtttaacagtgtctttattatctatattaaccgtctctgtctctgatacatcattctttttagtaactaattgaggaatttctttcaagtcatttttagcaactggtttttctgcaaataacgcttcagttaattgactctcttttgaacctggtgttaatttagcttgcttctgttttgcagcgtttgctaatctttcagcttgtgactctggttttgatacttctacctttgctgcacttgcatctttagttaatgtgtcactgtctttctctgcttgtgcttcttttttagcttcttgaacctcttgtgcctcttgtgatatatcacttaaattatttgcacttgcttcttcttttatcgctgcttgttgtgctttcaatgccactgcttttggttcttcatttgatacagctgcacttttatctgtttctgcttgtgcttcttttttagcttcttgaacctcttgtgcctcttgtgatgtatcacttaaattatttgcacttgcttcttcttttatcgctgcttgttgtgctttcaatgccactgcttttggttcttcatttgatacagctgcacttttatctgtttctgcttgtgcttcttttttagcttcttgaatctcttgtgcctcttgtgatgtatcactcaaattatttgcacttgcttcttcttttatcgctgcttgttgtgctttcaatgccactgcttttgattctttatttgatacagccacacttttatccgcttctgcttgtgcttctcttttagcttcttgaatctcttgtgcttcttgtgatgtatcacttaaattatttgcacttgcttcttcttttatcgctgcttgttgtgcctttaatgccgcttgctcatttttagatttgtttaaaaatccttcaacacgttcttttgtataggcaaccgtttcttcaagttgcgtttttctttcttcaaacttttgcgacagttcttgttctttgacttttaaatcatctgctttttgataaactttatttttaaaatacaaacctaaagctgaaccaacaagcgcgccagttataaaactaacaacaaaatctttacggtttggtagtggttcattttgataagtgtgtttattttttaatgttcttttatcattttgttgctgcgtcatttgtatatcctcctataacaaatgcacttaaataagtaacaacctcatttaagtgcatttgtttaattattaattatttatctactctagaagtatagctatgatttgcatcagttgctacattattagctttgtaatttgcacttccacgacggtagtgtctattttgccatttgtctgcaatttccattgcaacatttgaccattgaacaacttgtgagattttatcttcattttgagaaatattatgtgtaattgaatttgttacacgatctacagagctgtttaacgtttgtactgagtcaccgatacctttaacagcatctacaactgagtttaaacgatctactttaccttggatatcctcagttaaacggtttactttatgaagtaaatctgttgtttcacgagtaataccttgaacttgaccttctacaccgtcaagtgtttttgcaacataatctaagtttttcttaacagaatttaatacagctacgataccgatacataaaattaagaatgcaatcgcagcgataattccagcaattggtaaaatccaatccattaaaaacgcctcctaattaacatgtaataatgtcattaataataaatacccatactactctattataaacatattaaaacgcatttttcatgcctaatttatctaaatatgcattttgtaatttttgaatatcacctgcacccataaataaaataacagcattatcaaattgttctaatacattaatagaatcttcattaattaacgatgcaccttcaattttatcaattaaatcttgtatcgttaatgcgccagtattttctctaattgatccaaaaatttcacataagaatacacgatctgctttacttaaactttctgcaaattcatttaaaaatgcctgtgttctagagaaagtgtgtggttgaaatactgcaacaacttctttatgtggatatttctttcgtgctgtttcaattgtagcactaatttctcttggatggtgtgcataatcatctacaataacttgatttgcaattgtagtttcattgaaacgacgtttaacaccaccaaacgtttctaatgcttctttaatatttgtaacatctagcttctctaaataactaatcgcaattacagctaatgcatttaaaactgtatggtcaccatattgtggagacaggaagtgatcataaaactcaccatccacatacacatcaaaagcagtacctttatccgtaatttgaatattttgagcataaatgtcatccgaatctttaaatccataataataaattggaacatctgcttcaattttacgtagatgttcatcatcaccccaagcaataataccttttttaacattatgtgccatttcttggaatgcatcaaaaacatcattaatatctttaaaataatcaggatgatcgaaatcaatatttgtcataattgcgtaatcaggtttataacttaaaaagtgacgtctatattcacatgcctcaaaagcgaaataatcactttcaggcaatcccatacctgtgccatcaccaattaaaaatgaagtctttttatcaccattcataacatgtgataataaacctgttgtagaagttttaccatgtgcaccagttacagctactgaagtatattgatcaataatctgtcctaaaaaatcattataacttacaacatctaatttcaattgatgtgcacgtactatttcttcatggctactcgcgaatgcattaccttgtataactaccatatcttcttttatgttattagcatcaaatggtaatatttttatccccttatttctaagagcaacttctgtaaatacgtagttctcaatatccgatccttgaacttcatgtcctaaatcatgcatgatttgtgctaatgaactcatgccagaacctttaattccgacaaaatgatagtgtgtcattatataaaactccttactcataattattctttatttaaatctgcttccgtaacataaacatcccttggttttgaaccattagcactcgaaacataaccgagttgctctaattgatcgataattcttgctgctctattatagccaatttggaaatgtctttggattaatgatgttgaaatatgtccttcattaaccataaatgcacaaacatcatcaaataattcatcttgtgattgtgtttgtgtttttttcaacaattctttttcttcaaatagatagtccggttctctttgttgtttgataaaatcaacaacatcatcaatttcgtcatcagaaacaaatgtaccttgaactctaatcggtttattcataccgctaccaagatataacatatcgccatatcctaacaagcgttctgctccaccactgtctaatatcgttctcgaatctacacttgatgataccataaatgcaattcttgttggtatgttggctttaattaaacctgtaattacattgacagatggtctttgcgtagctactaacatatgaataccacatgctctcgctttttgagcaattctagcaatagactgttcaacttcttgcggagccatcatcattaaatcagccaactcatcaattacaatgacaatttttggcattctttcatcatatggtgcttttttgttaaatgctgttatattacgtacatggtaatgtgcaaataacttataacgtcgttccatttcttctacggcccattttaaactctgtgtagctgctttgacatctgtaattaccggtgcaactaaatgtggcaaaccattataaggagctaattcaaccatttttggatcgataagtaataatcttaattcctcaggatgatttttatatagtaaagacatcaaaatactattgatacaaactgatttccctgatccagttgcacctgcaattagtgcgtgtggcgttttagcaatatccataagtaatggttcattattaattctataccccatcgcaactgttaatttagattcagcatttttaaaacttggagattcaataatagaacgtaagttgactgtcgttggattttggttcggaacttcaataccaacacgactagttcctggaataggcgcttctatacgaatatctttcgctgccaatgccattttaatgtcatcttgtaatgccgtaattcttgaaactttaacacctttttcaactgataattcaaatcttgtaacacttggaccttcagttacatcttgtacttctgcaggtacattaaagtaaaataatgcgtcattcagttctttctttttatctgtaatccagtcctcgtccgactcaataacttgtggttcttctagtaatgaaacacttggcaatttaatatttgggcctttacgaatcatcggcttagatgtttgtacagcttgatttgttgcaacatcttgttggttcgtccgaggtctattttcattagctgtatcttcatttttatttgaaaatgatgactgtaaatctttttgttgatcatcattatcttgttgtccactagtattgtttggatgtgttgtttcttcgctttcttcagttatgtcgcttacttctgaaactgaagacgaagttgattgatcaacttgctcattttccaattgattatcatcttgactttcttcaaatatttccgtttgagttgaatcaacagaaggtttctgctctgaatattgttgtgcattttgataatcattttctgtttctgcatgaccaataagttgattgttctcaacattgtttgatgtcatattatttgttttatatgcatttgtatttgactcttgtgaatcagatcttgatgatggtgtggcttgactcgcaggcattctttcactcacagcttgcttactttgtacaggctttaattcaggcacattgacttttgaatgctttttacgatccatcatacgctttttatcagatggcgtcatgacaacattaaatggtcttttacttaaagttgaaaccttttcagtctgtttctttggatttacgttttcaatagttttctcttcgacattttgttcactttcagctgcttcgttttgcacattttctgtaatttctgcgttattcttttctatttcattcatgcttgaatcttccacaacatgattatcattcacatcattcgttttcaatgagttgacacttaagtttgtttggtcatcttttttatgacgcggtgctaattcaatttcattatcaaccgttttatcgatattatttacttgagattcagttactgcgtactcttgcgttttaggagcgtctacatgcatttcagacgcgtttctattggtattatcttcgatatttgaagtagtatcctcatctacttctgtatcatttaattcataaaattctgcatcatcgatttgacttcctgaatattcttctttattcgttgctccatcttcttctgaatcagcaattaatctggattgattttttagttcatctttatcatttacttcaacgttatgttgtagtgctgattgatgttgagacgttacattcgaaaccgtaacttcatcatctgacaattgttttgttgtcgatacttgattcaaactaacttcctcataattgtatggactttcatctacatgagtgtcattagtgtcttcattttgtattgacgcttgtttattttcatcatttgatacagtttcattctctatgccatttgtatgaagctgactagcatctgtactattatctgttaagtcactatcatcatttaatgaactatcaccaacatagcgttccgcttgtttagcatacatttcatcaattgcacgttgtattgcatcttgctcttcgtttttatgttcttcacgcttttgttgcaacgcttttttaaatcgacgcttttgaagcactttacgttctcgttcacgtctaatttcttcaacaatttgtgaagcataaatattttcaattttgatagtattatcaacttttgaataattaggcattgattttgttgttgatgatacattttcatcagatgatttagatgcagttccttgtttgacaacactatcattttgtttttcttgttctaattgtttattttgagacgtttgcgtcttagctacatatttatcatatttttgtttatctgactcaactttttctgaaggtttacttacagggatacgaccattttctaactttttaggtttcattgtgccaaaaatagctgacggtacctctgaagtcttgaaactttctttgtgataatctggagttgaatctttagcacgatgatttgtattattagaatacatattatgtgtttttggcttgtgcgtttccttctcaataccattaattgcagaaacatatgtacctggcttattcgtatggtaatgtgaatgatctttatattttatactttgctgtgatattttagaattcccacgttgttcactataattttgttcttcagttgtttgatttcttctacggcgatgtcgtttttgtgaacgagaatcgtggctttgtttgcgatagtctcgatggtattgttctttttcatctgaaatagtatctgcagattgttcaacattttcattttcataagctacgctcataggaaaacggaattttcccctcggacgactataaatatcattattttgaggcagtaatgagtcatgatcgttatctatattttgtgattcttgacgtctttttttctttctatgaatcaagtcatcatttgaatcattatcttcgccgaataatttatcaaaccagctcatattttcactaccttccttaattattcaaaaaatgcttgtccaatttcatagctgtcatttaataccataatacctttttcttcaggtgcattaggtaaattcaattctttcattgaacaaatcataccgcttgaggcaacaccacgtaattcagcatctttaattaccataccgctaggcatcactgcacctactttagcaacaacaactttctgtccagcttcaacgttaggcgcgccacatacaatttgtaatgtgtcatttccaacgtttacatttagtacacttaatttatctgcatcaggatgtttgtctttagtttcaacgtagccaactacaaatttcggtgatagatcagcatttaatttataatcaaaaccagcttctgaaatacgcttttggaatacatttacaagttcatcagttaatttaatatgacctttttcttcaattgttatatcttttgaaatttcaaaaatattataacctacaacattaccttcattagtaatttcaacaacattaccttttttattgtagtttaattcaccttcaactggttcaatttgtaaaaatgcgacatctcctacatatttaggattgtaaaataaattcattatgacaaaactccttatccaattatttctatttatctttattaaatttacgacgatttgcttctaaacgctgaatcacgtttggatctcttttttgtttattatttttacctaaaataaatatcggttcaagatgaccctgtttatatccaaaggataatgatgtaattggaactagacctttagtgaaaaattccattgttaaatgtgccatcacatcatatcctgttttattgcgtatatctgcaataattaacacatcttggtgtggcactgctacgagcatttcgccttgacattgtgcctcaatttcatttaaaaatgcagtatttagtatcctacttgcatcatacccgtcatttgagttaataaaataaaaaatattaccttttacttcatcagtcgtatatgaatttgacaattttctaacattaaacagagacatttctcttatttgttgttcagttaacttcaaatcctctaacatgctttcgtcaattagacgatatgatttccctaaatcgactgcataataaactgctgtttctgcagtatgctcatcatagataaaaggaacaccttgtttagtttttttatcaaagctagtcgctctaatgacaggcataatttgactagatgatatactctcaagggttttatctgccatttgtgcaatagcttcatcaacgtaataaacaatttcatctacaattttttcttttttatcttcatattttgcgactatagcgttaagtttaatcgtgatacctttgttattatctgttcgataaatacgcaaagtttcttcttcacgattaaatttaaaatcaacgtctaaatggcttaaacgttcctttaatttatctctcatttgaaaggtattcatatgtaacactcctaatttcgcaccttataatagtttacaataaatcaacacatagtaacagagaaaaacgagtattaccccgtttttctctagtctaaattacacgtattgagctaaaaatgcatctatctgttcaattgattttcgttcttttccaatataacttccaagcagttctccatttttatatactagaaaacttggaatacccataataccattttcaatacaaatatccataaatttatcacggtctactgatacgaagtcaaacataggatatctcgcttctaattccggtaaatctggttctatcactctacaatctggacaccagcctgcagtgaattcaaatactgtagcaccttgttttaaagattcaaattgttgttctgattcaagttgtttcatttttatgtctccttaattaatgattatatataactatttagagataatagttgttattacccgattatttatattgtaatgtttctatttgattattatctaaattacaaatggcttctgaaagtaaagatctagctgcaaaatagtctcttatatcaaatactgagtctgtactatgaatatatcgtgcacatacaccaataactgcagtcggaataccaatattagctttatgaatttctccaccatctgttccacctggtgacatatagtattgatgttcaatgtcatgtgcttctactaactttaataaatagtctctaaatacaggctttaaaatcattgtaccgtcttttatgcgaattaacgtccctttaccaagttcaccagataatggttggtttcctttaacgtcattggcaggtgaacaatcaactacaaatgcaacgtctgggtctatcatctctgcagatgctttcgcacctcgtaatccaacctcttcttgaacatttgcgccaacatacaagtctacatctaattctatatcttttaataattctagtatttcaattgccaagacacaaccataacgattatcccatgctttagcactatatcgatgttcagataactgtgtgaatggcgtgtgaggtacaattgtatctcctatatctattccgcgctcacgcacctcatcttcattttgagcacctatatctaatgttaaatctttaatttccggtgcaccttcactaccagtacgaaaatgtttaggtatattagaaacaacaccgataattttatcgccatttctatttttaattactaagcgttgtccttgccaaatatcatttgcaacaccacctaaatttgtgaattgaatcattccatttttagtgatatttgtaatcataaatccgatttcatccatatgtgctgcaatcattacacgttttgcatttggatttttagattttttcacaccaaaaaatccacccatacgattttcaataaattcatctacgtacggcgccatttgctgagtcatataattttttacttcttcttcaaaacctggtgccccatgaagctcagttaaagtttgaattcgttgtaatgttacttttttatttatgttcataaaagttctcactccttataagttattatatcatcttcaatatggtaaactaatgatatgaatttgaaatcaagggagcataaatgatgactaaactgaaatatataattccaacaataattgcagtagccattgtaattatttctaccatttcaatcatccaatttattaatcgtaaacgctataatcccgttaaagtacttaatgaagtaaaatcatattttatgaatgtcaaaggctcatatatcgtttatgaaccattcgttcatcctgaaactgataaataccgtttagtttatcaaggtggaattacaactattaaaaatggtcaaaatattcattatgatttttatgcagatgcatatactggtgaagtcattaacattgtagagcgttaatacgaattttatccatatttgatttggatcgtaaaacttaaaaatgagccacaccctaattagtaagattggatgtggctcaattttttatttttgaaaatttgtttagtaatacatctttattttagttattatcaactaatgtttcacgtaaaatatatgcatctatgttttcaccattatcgctgtattttacagcaaagtagttttcatcatgataaaacaagaaccaatattgttgctgaataaaatatggtatcatgcgttctttttcacgaatcgattgcataggataatcatcatatgccgttacccatagaggatttttatgtgcagtagttgggaatatatcacccatatgaactgctttatctccttgactttcaatcgtaataatcgtgtggccaaagctatgacctccactatgttgcatcttgatacccagaaccggttcaaaatgtttttcgaataaaatcaacttgttactataatcgcctttattcttatcccagtaagttgatttacttcttatattaggtgcaataaactcatgccactcatcttgttgcacaacatgaatcgcattttcaaaaattgcatgtcctgcttgatcagtcaaaccggcagcatgatcaaaatgcatatgtgtcattagcacataatcaatatcctttggcgttaaattataatttgccaaatcagcaattatatgactttcttcatctactccaaaattacgtaattgcttttcagataatttaccattaccaatacctgcatctataatcaaattatattgagccgtttgaatcaaaattggatgtgtcggtaaattgatttgatttcgttcatttgcattgtattgctttgaccacaacggcttcggaacaacaccaaacattgcaccgccatccatttttgtattgccaccatttagataatgaatagatatatccccgattttcataacatcacctattctttctgtattcgttattacaattagcatgtgtttattacatcatatcactattcataaatgcgaacaaaaacgaaacgccccacactaatacacttctaactacttataaagattaatgcaatcatattatatgtaaatgcatcataaccatcggcctgtaattttaaattaataattaaaatttacaagtaaaatgcaagctttattcttttaaatcaaaggtatttagtataacattgttcataggcgcattatctcctttagttatttgtttagtcacttttaattatagagataattgcgctttttttatattcaaaatcaaaaaatcggacagatgaaaagttaaaaactttttccatcagtccgatttattatagaacctttatctatagaaccattatagtacgaaaaaacacttatgattgtatgtgtacataccctcataagtgctctatttttgtgaatggaatttcgcttccatacgataaatacgtgaccctttatccgaaaatttcttttcatattctgttaaaatattactgccatcgtcttcttgatgtaaatttagatttatttttgtaaaatacattccaaattgagacatactttctaaactgtaggcaaatagtcctctgttatcagttttaaaatgtaaatctccttcatcatttaagatttgttgatacaacgctaaaaacgtatgatacgttaaacgtcgttttgcatgacgattttttggccatggatctgaaaagttcaaataaatacgcgaaacttcgccgtctttaaaatattcatttaattcaatggcgtcattacaaataatctttaaatttgttaaacccatctctttaactttatccaatactttataaacgatacttttctcacgttccattgaaatatagttaatatgaggattttgagcagctaatgttgtaataaactgccccatacccgaaccaatttcaatgtgtatcggttgcgttttatcaaaccattcagtcattttccctgcatgttgaccgtccatgtcaaccaattcaggatgatcttttaaataatcttcagcccatggtttgtatcgaactctcatattttattctcctcttaaataaacatgttactattcataacttcatttaggaatttaagccaagtgttcatatccttatatcttttttgctcttcataccattgaacaagacctatagattgaattaccgtataccatttcatacgtttatttaaattcaagctctcttgaacaccatatgtttcaagccattcagaccattgttgttgtggaacatagttgtaaagcagcattccgatatcaattgccgggtctgcaatcattgcaccttcccaatcaactaaaaatagttcatctcgatcggataataaccaattattatgattcacatcaccatgtacaacagtgaaaaaacgcgaatctaaactcggtatatgctcttctaaataggttaatgattttctcacaatatgatgtgttaaaactcctcttgataaagaggcattaattttattaagcataatctcaggagtaataggttccatttccatacgctttaacatacttaataaaggtctagaattgtgtatcttctttaataaatgtgcaactcttgtttgcttcatttcgtttgaagatagttcacgcccatttttccaatgttgtgctgtaacaacctcgcctgtttctatgcgtttcgtccatactaatttgggcacaataccttctgctgataatgccgcaataaatggatttgaatttcgttttaaaaacaacttttgtccatcttgttcagccatatatgcttcaccagatgcaccacctgctgaatcaagtgtccaccctaattgataaaactgctccaactcgtccacctcactttcaattagaaaatggctctagaaataggtttttcaagagccatatattctaatttataacaccatactggtacaaatattatgtccagataattattgtaaatcctcaaccaatgcctacattacacgactaaatttaaatcgtaatgtctgtcattgacaccatacattctatagtcacttacttgacatataatgttaccgtgtctaaaactacatgtttttgaatctctgtaggcgataaactctagttttcaaaataattgctatcccattttcatggttagcataaatttatgaactgtaacatttacgtacttagtaaaatatgatgcacatcatatttgtaactcatagaaaattttataatttttatcattatatttcaactgaaaatgagaaacaaaatggcactttttactaatatgtgttttctaaacaacacttttaagcttcgttttaaattataacataattcacttacgaaagttgataaatttaagtaatttaatctaaaaatatgatgaaagaattttaaatactgtgtgactctatatacttttcaaatccttcttgtagttgacgtgtaattgggccaactttaccatcattaactggttcaccatctaatttaataacaggtgtaacctcagctgaagtacttgaaacaataacttcatctgcgtttttcaagaaatctacagtaaacgtttcttctttaaatgggatgttatagtcttcggcaatttttttaattacaattcgtgtaataccattaagaatatagttgttaatcggatgtgtataaatcacaccgtctttaattgcataagcattacttgaagatccttcagttacagtttcacctcgatgttgaattgcttcaactgcattatatttcacagcatattcttttgctaatacatttcctaataagttcaagcttttaatgtcgcaacgtaaccatcggatatcttcaacggtaacaccattcacaccattttctaaatgatcataaggacgatcataactctttgtataagcaacaattgctggttctacttcaggtgtcgggaagctatgattcctttcagctacaccacgcgttgcttgaatataaattgccccagtttcaatttgattcatatcaactaatttacgagatagttcaattaattcttctacagaataatttaaatctaaaccaatctcattggcactacgtaaaaatctttcataatgttctgttactgtaaataacttaccattatatactcgaatgtattcataaataccatcgccaaatacgtatcctctgtcgttgtatgaaacctttgcttcacttggacttacaaactcaccatttaaaaaaattttttccatatattattcctccacgcataatgaataaattgcttctaagtaaatactagttgcgttaaataactgttttttagtgatatattcatttttctgatgcattaaatcttcagaatcactaaacattgcgccaaatgctacacccttgtctaagtttctcgcataagtaccgccacctatagtataaggttcagtcatatcatttgtttgatttctatatgcagtaactaacttttgtacaaaaggatcatttttatcaacataatgtggtggttggactttacctaatttcacttcaaagccatattgttgaatctcatttgcaaaacgatccatagctttttcaaattcaaatccttctgggtagcgtaagttgataccgaaaagacctgcgttttcattatcatatgtaataacaccaatgttagttgtcacgtcacccatgacatctgtatggaatttcattcccatcttttcaccaaaatctgaattaaataagtagcgattactaaatgctacaaacgcttgtgcattattatcaagatttaatgatgctaagaattttagtaagtaaagacccgcattcacaccgatagatggatccataccatgaaccgctttaccttcaactgttaaaactagaatgccactatcaacagtactatcaccttgtaaatgattttgttctaaaaagtactcaaagtcttgaataacatctgtcatattttctttaacaagcactcttgcttctgcatgatcaggtaccatgttgtaacgttcaccagatttaaaagttattaattcataatcaggttcatcttgatcttcagtaagtttattttgaactaaatcaaatgttgtaatgcctttttcaccatgaatacatggaaattctgcatctggtgcaaaacctaatgttggcatttcttctgttttaaaatagcgatccgtacatttccaatcagattcttcatccgtaccaataatcatatgaatacgtttcttccaatccacattcatatcttctaatatcttaattgcataataagcagcaattgttggacctttgtcatcaagtgtacctctagctatgatagcatcttctgttacaaccggctcgaacggattactatcccatccatcaccagcaggaacaacgtcaacatgacataagatacctaatacgtcatttcctttacctgcctcaattcttcctgcaatatgatccacatcatgtgttgtaaatccatctctatgtgcaatttcatacatgtagtctaatgccttacgaggacctggaccaactggtgcgtcttctgatgcttttgcatcatctctcacactttcaattgctaataatccttttaagtcattaatgatttgatcttcgtattgttgaactttttctttccacattcgaaatcgacttccttttttctataagttaaattctattttacatgaaaagatataaaaactacaataagatgtcagaaaataataaaaaggaacaaaacgatgctattgatatgacacaaatcataaatagctgctttgttccttttttaatttatatatttaaaatacacatattcaagagctcgagatataagtcaatgtactaggcacacaatttaatattgacagtaattaaccgaacgaaaatgcgccccggggccccaacatagagaatttcgaaaagaaattctacagacaatgcaagttggcggggccccaacatagaagctggccaatagttagctttcaataatgtgcaagttggggtaagggccccaacacagaagctggccaatagtcagctttcaataatgtgcaagttggggtaagggccccaacacagagaatttcgaaaagaaattctacagacaatgcaagttggcggggccccaacacagaagctggccaatagtcagctttcaataatgtgcaagttggggtaagggccccaacacagagaatttcgaaaagataaagaaatacgttttctttagatattagtatttcttatgaatgagtttcacgcatgtattcttctttctatatgcatattagctatgactaacgataaagaacctgaaacactaataaatgtcctatagtttacaatattatattggcagtagttgactgaatgaaaatacgcttgtaacaagcttttttcaattctagtcaaccttgccggggtgggacgacgaaataaattttgctaaaatatgatttctgtcccactcccttatcatttctgtcctactcacatcttattctttatcagataatgcatttttattcttttttaaatcttcttcagtgacgatacgtaaattattatttggtgctgcgccaccttcatcatcaaatttacctttttcaatactttcgtcagtcttattgtcatattcggtaaattttgatttttcttctttgaaaaatgcttttggattattttttaatctattagcatattctttcggatttgtttttacttctttaattgtttcattagcaattgttcctaattgcgtcgctttatccttagcattatctttatagctttgaggatcttgtttatatttattatattctgctttcagcttgtcacgactatctttacgtgtaacaagtacagctgctacagcgccacctatacctaaaatcgctttaaataaattaccttttgccatatcaatcgtctcccttttatttataatttaatttgtcaaaatcattttcagttaataaacgatattctcctgaatctaaattgctgtccaattctaaatcagcaattttgatacgtcttaaatgtaatacctcattttgaatgctatgaaacattcgtttaacttgatgatattttccttcataaattgttacgtgtgacgtttgattatcaatataagttaatattgcaggcttaaccttgccatcagtcagtgttacaccctctttaaaagcttgaatgtcgtcttcagtgataggatttgctgaaataacttcatattttttagaaacatgtttgtttggactcattaattcatgattaaaatcaccatcattcgttatcaataaaagcccttctgtatctttatcaagacgaccaaccggaaaaatatttagatgttggtattcaggtattaaatcaataacggtttttgaatgatgatcttcagttgctgatatataaccttttggcttatttaacataatatagacattttcaatgtattctattaattctccacgaactgttatcttatcgttttctggttctatatgtgtttttggtgatttaattacttgttcgttgacatttacaaggccttttttaagtaactgtttgacctcattacgtgtaccgacgcccatatttgctaaaaatttatctattctcatcgtaaaaacctaactctacgtcttaatttttcaggaatttcacctaagaattcgtccgcaagacgcgttttaattgtgattgtaccgtaaattagaatacctactgtaacacctaaaataataatgattaagtaaccaagtttagtaggttctaagaatagatttgcaaggaaaaatactaattctacacctagcatcataataaatgaatacaagaatatttttgcaaaatgaatccaactatagctgaatttaaacttcgcatattttttaagaatatagaaattacatccaattgcaaataataatgcgatactagtacttaaaattgcaccaggtgtatggaataacataattaatggatagtttaacgctaacttgataactacagaagctaaaataacataaactgttaatttctgtttatctataccttgtaacattgatgccgttacacttaatagtgaaattagtattgctacaggcgcataatagaataataagcgactaccatcatggttagggtcatgacctaaaacaattggatcgtaaccatagaaaactgtgaataatggttgtgccaaggccataattccaatactagctggaacagttataaacattaatacaccaatagatgttctaatttgatgatgcatttcatgtaagcgaccttctgcaaatgtttttgtaatataaggaattaaactcactgcaaaaccagcacttaatgatgtcggaatcattacaattttattagttgacatatttagcatattaaagaatatatcttgtaactgtgaaggtataccaactaaagataaagcaccgttatgtgtaaattgatctactaagttaaataatggataattcaaacttacaataacgaacggtatactataagcaataatttctttatacatcttgccatatgacacatctatatctgtgtaatcagattcgaccatacgatcaatattatgcttacgctttctccagtaataccagagtgtgaatataccaataatcgcaccaactgctgctgcaaaagtagcaataccattggctaataaaatagagccatcaaagacatttagtactaaataacttccgattaatatgaaaatcacgcgtgcaatttgctcagttacttctgacactgctgttggccccatagatttataaccttggaatatccctctccatgtcgctaatacaggaataaagataacaaccatactaatgattcttataatccaagtaatatcatcgactgaccaaccgtttttatcatgaatgtttctagctaatgttaattcagaaatataaggtgctaagaaatacagtaccaagaaacctaaaacaccggtaatactcattacaataaaactcgatttataaaatttctgacttactttatatgccccaatagcattatatttcgcaacatatttcgaagctgctaatggtacacctgctgtcgcaactgcaattgcaatattatatggtgcataagcgtatgtgaacggcgccatattttcttgtccaccaattaaatagttgaatggaatgataaaaagtacgcccaataccttggtaattaatatactaatggtaattaaaaaggttccacgcaccatttctttactttcactcattacgaatctccctatctcatgtttattaaagttttgtaaactaaaagctgtttctctgtaaaatcatttttcattattatgaatatatcacaaaactttatttcattgtcgtatattcaatgaattatcataacaaaattatcaacacattgtcattgaatactagattttgattagaatattacgaaatttcatataaacattatactactatttgagatgaacatcgcataacagtagaaaaatcattcttatcatacacatacatcttcattttttatgaagttcacattataaatatattcaacataattgtcatctcataacacaagagatatagcaaagtttaaaaaagtactataaaatagcaattgaatgtccagtaacaaatttggaggaagcgtatatgtatcaaacaattattatcggaggcggacctagcggcttaatggcggcagtagctgcaagcgaacaaagtagcagtgtgttactcattgaaaaaaagaaaggtctaggtcgtaaactcaaaatatctggtggcggtagatgtaacgtaactaatcgattaccatatgctgaaattattaagaacattcctggaaatgggaaatttttatatagtcccttttcaatttttgataatgaatccatcatagatttttttgagtctaggggtgttaaattaaaagaagaagatcacgggcgtatgtttccagtttccaacaaagcacaagacgtggttgatacattagtgacaactatcgaacgccaacatgtaacgattaaagaagaagaagctgttagtagaatcgaagttaatacagaccaaactttcactgtacatactcaaaataatagttatgaaagccattcgctagtgattgctacaggtggtacaagtgtccctcaaactggttcaactggtgatggttataagttcgcacaagatttaggtcataccattactgagttattcccgaccgaagttccaattacatcagctgaacctttcatcaaatccaatcgtctaaaaggtttaagtttaaaagatgttgaattgtcagtacttaagaaaaatggtaaaaaacgcatcagtcatcaaatggatatgttatttactcattttggtatcagtggtccagctgcattaagatgtagtcagtttgtttataaagaacaaaaaaatcaaaagacacagcacatttctatggcaatcgatgcatttcctgaattaaaccatgaacaattaaaacaacacatcacatcattattatcggacacaccagataaaatcattaaaaacagtttgcatggtctaattgaagagcgctacttactgttcatgctggaacaagcaggaatcgatgaaaataccacatcacatcacttatcaaatcaacaattgaacgacttagtaaatatgtttaaagggtttgtatttaaggtgaacgggacattacctatagataaggcatttgtcacaggtggtggtgtgtcacttaaagaaattcaacctaaaacaatgatgtctaaattagttccgggattatttttatgtggtgaagtattagatatacatggttatactggtggttataatattacaagtgcactcgtaacaggacatgtcgctggattatatgccggacattactcacatgcatcaatggaataatagtataaaatttggttcgattctctttagtagatcaactttttcattcaaataaaaatgaccttaatataactgagtcactaaaaagtgtcgttatattaaggtcatttcgttaattatgattctttttcgtttttagtacgtcttctagctaacaaagccgcacctgtaatcagtgcaaattctttcaatggtaaatccattccttcagaacctgtatttggaagttctttttcaactttgcgcgattcatgtgtctcttcttttttaataggcgtacaaacttttggagctggctgaatttcttttggtgatactttcgtcgcttcagctggtaatttaattgctaaaatttcatcaacaatgaattgcgtgtgttgtttgatgtcatttaatgtcgcatcttcatcaatcattctattgccatctgcaacatattgatcaattaatacttttactttagctaattgttctggtgttgcgatcgctttgaatttcgcatatgtttgttgagcaatgttatcaattcgcagtaagctattttctttttcagtaattactgcttctatatcgcttaatgcaacattaaatcgttttaaaactgcatcaacatcagcattagtgcgtgctgtttttaattcttcatccatttgtaattttaaagcagttatagcttttaatgcatcagccttattacgattacttacttttcgataattttgcactaaagcagtgacgcgtgcaagatcatcattaatcgttttttcagcatctggctttttaataggatgtacatctaaatcatgtattgtttgtagatttaatgatgctgttttatcaacttgtgcattgctacgatcttgatcaatttgtccaatagcagtgtcataaatattttgtaactgtgctaatatactatttctttcttctaccgttgcttgaatattcgcttcaattgcttgttttttatcgttgaataatgttgtcaattgttctcgagcagacgcctttctgttaataacaggttcgatttcacgaatttcgtttttctcatcatgcaataaatatgccacatctgcattagtcactgcactagcaatttgttgtttagctttaattaactctttttcaacttgtgctattgcaatattttgttcttcatctgtcgcttcgttatttgctttaattaaattaattttatttgtagcgatattttgaatttgttgtaatgctgttgctttaactgttgtcgctggtttaatttttgaaataatattttgagcatttatactatcttgattaacttgggcagtcttatctgcatgattgatctgatcaatagcctgattaagtgcttgttctactaaatgtttagcagctagtctttcttcttcagttgataaatcgctttgatcgattagtgcattttgagcttcggcttttacaccaacagattgacgcgctgctggtttaacttgaactttaggtaaaatcactttgatgttgtcgttgccatcagtctcagttcgatccacttctgcattcgttttgttttgtgcaatgtcatttttaattgtatttacaattttatttaaagtatcaatagcaacatctctttcatcttgagtagtatccaacgtatttcggattgcatcgagttgatttttattattttcttcaatgctatcaagcgcagctcgtttacgtcttactttaggttttatttgctctattgccttgattgtttgatttctaacatcagtaacagcagcatcttgatttgtattttctatttcttgttgcgcttgtttgagtgtgtcgctaattaattgattcgcttcatctaattcatcaactgttgcatgtggtgtatcttttattgattctacttgattttctgcacttgcttttattgcttgttgtgcttcaggcttaattacaatatgaggttgtacaccttttagtgtagcaatgccatttgtttcaacacgtttcacatcattattcgctattgcttgatcgatgttttgtaatgcacgtttttcattattcgctaattgatttaaagcaacttgtttttcttcatcagtcgcatgttccgcttgctcaatttcgcgctttttagcttcatattgttgcttaactgcatctctagcagctgctctaacaatatggtcaggcgtcactaaagcaatgctatcaagcgcttgacttgttgtatcatcaacttgttgatttgttctattattcgtaatatctgtcatggcttgatttacaaattcattgattttatctagtgctacttgtctttcttctgctgttgcttctttatcctgattaatcttagcacgtaattcattcgctttttgattgattttttcacgtgcagctggtttaacttttgtttcaggttgaataattttaatcgctgatacaccatttgttgctgcttgattcacctgactattcgtttgagcttggtcaatagctgcaagtgctttttctttttctttagctaatgcttgtgaagcaacttctttctcattatctgttgaatcaagactattatcaatttgctgttgcttttctttaacagctttttcaatatctgcaattgcctttgttttaattactacttcagcttcaacattatctatagcatttaccgcttgatttgtagttgtgtctacctgatcatttgtttggttttgattaatttgattaattgcttgatctttaagttgattgatttgattaacagcagcctgcttttcttcgtcagttgcattaggtgtttgtttaaccgcttcaatacgcttcgccacttcagcagtgattttatctcgcgctgcttgtttttttactacatcaacttgaacagcatcgatattattctctgctactgtcgcagcttggtctacttctgcatttgtgttagcttgtttaatactttcaatagcttgttgtctgtcttgatttaaagtattgatcgcagcatttttctcatcattcgttgcatctggtgtagcattgatttcagctaatttagcattataatgctgattgatttgtgctaatgctgcaggttttttaacaatatttggctgaatcgcattaattgcttttgtacctaattgttgcgcttgatctacttccgcatttgtatcagcttgatttatattattaattgccgttgctaactcttgatccacttgatttaaagccacttgcttttcttcagttgttgcatttgtgttttgattaatttcttgctttttagcagttgctaaatcatttaatacacctgtagcagtttgtttcttcgttacatgcggttgaactgcgccgatttgattgactgcatcgtctctaatactattgaccatcgcagtagtagacgtcacaccaatatcagttaatgctctatttttaagtgtattgacacgatttatcgcttcttgtttctcttctcgagtcgcgccagttgtagcattgatatttgttatcgcctctcgcgctttatcatttacaacattgcgagtatccgttttaacttgtgttgccggttgaatcactactatattttgtgtgccctgatcttttgcttgtgcaacttcttgattcgtatctgctgcattaatattttgcttcgctgtggctacagcttgatcaagtaattgttgtgctgcttgttgttcttcgagcgtcgcatcattattattaaatatcgtattatgttgcgtttccgcacttttatcgatggcattttttgcatctgtttttacttttgtagctggtgtaattgcttgtattccttgaatcgcatttgtctttacttgttcaacatcagcattggtattagcgtttaaaatgtttgtgtttgctgcagttacagcagcattcactttgtcaattgctgcttgtctttcttcttgagtcgcatcaggattagcattgatctctgcgatatgttgttgtgcatcatgtgatacggcatcccttgcagcttgcttaacaacagttacaggagcaattggattaatggcatttagaccatctcctttggcgttatcaacattagcatttgttgttgcttgattgatttgttctaaagcatggttggttgcttgagttaattcgttcaatgctgcatttttctcttcctgagttgcttctctattactatttatttgttgtcttttcgttgctgttgcttggttaattgcatctcttgcagcttttttatgagttacttgaggaacaactgctccaatagtattgatgccattatttttagctgtttcaacgtcagcatttgtagtagcattcgtaacattatcaatagcatctgtttcatccgtagctaattgatttagtgcatcttgaatctcgtcttcagtagcatctggtgttgcattgataatttccctttgtttcgttgctttatcacgtattgcttttttagcatttggtttaacaaccggtgttgcagtatccccacttaaggtctgtataccttgatctttgattctagtaacgccatcatcagtcgtttggtcaccaatattaccaattatttcatttttatgttcctcgataacttgtattgctgcttgtttttcttcatctgtcaattcatcattttgattaactaaatcttccatttggtcaacttttttattaactgcattttcagcatcaacacttcgaattaacgtatgttgcatttgattagttaatgaatcaatatatgcttgagaaactcttttatttaatggtacattgttacgattttcatctaaaatcgtttgtgcgcgtcgtttcagaccattaaagatatctaatgacgcaaatgtataatcagcttgttgaatacgtctgtcaacttcggcttgtaatgcatctttattcatgatgatatcgatagtatatggatttgtacttacagtatgactttctgcagctgaattaatgaaatcttgtgtatatgttttatacgttaatgtctcgttaaatgttactgttcttggtgtcggcacattatttacacgtaatttatatcttaaatcgagtattttatcaggcataagtcgtgccggagagtttgctgtacctcctccagtacttttaattgttatcacacgatttgctgcatcatatgtaacattcatatcattaacatcaacgcctgaattgttacttggaaaatctttagtcaatgaattgttcacatattcaacaccttcaggtaattgaacttgatatacaaagtcatttgtatctagagaagcaccagaattaccattattctttaatgatgttgttacagtaaactctttattatttgttgctgttggatccattgttcgtctttcaacaaaaacatgtgacccagaatgaagtccgatagagtcaacaaagctatagtatttgtaaccatcttttagttgataaatgccacgcgcatctgttattgcgtcatttttaggtacaaattgaattttgagatttctcacattatcaggtactttaaataaacgcaaagttggaccgccttcaacagtcttttcagcaatcgtatcattagtatcagcatttttgataataacatttgttgcgccttgaccgtttttagtagtcattgtattaaattcaaagattaattcagaattcggatttactgttaatgctttctcgataccattaaaatcgccatggtcattcgtatcagttccatgtatacgacctaatgcaattacatttccttgtgcttgatagttcttattatctcctgaatcaaacatgctcgttcttaccattgcatgactaaacacccctactttgccaccattgattagtgtgaagcccggcaagttattaacaacgtttactgttggcacagaacggttggtacttggtctaataccattgtcatcaaatgacagcacttcgttaggtgcattttgtcctgcattattggcattaggatcagttgttggcgtatatggcgctgtaattgcaactggtgcaccaccgtttcctaccgctgcagccgctggatctgctggagttgcattaggatctgccggtgccgcacgtctacttctctttttcggtctattagatgctggttcagcaattgcaactagctctggtttatttgaagaatgacgaacatcttcttgaatttcctttaaagttagatgtcctcctgaaccattttcatttgttttagttggtacatttaatgcggtattattcgacactacatcattattattagcgtttgacactgtctcagttgctgttgtattgccatctgtatgattattgttttgtgctgaaggcgtacttgattgcactgatgttggcgtagcttgatttactatactaccattattatgattaaccaatgcttgattcgttgcttgattggttgttgcagattgattaggtgtattctgcgcactatttgctaaacctctattattagcaacatctttatcttgtgaatttacaggtgttgcttgattagtatcgctttgtacattattatccgtagttaaggcttgtgcaccatttgggtttgaaagtaataaaactgttccgattaaagtagagaatatgcctactttatacttcctaatactatatttatttttctttaacaaattcatttcattttcctcctggttgtctgttctctgctgtgttgttaagaattatgctaaaaatatacgctccctcatattatatttatagctatattatatttatagctatattattttgtacaatattttaagttcactcaattttatcatcatcattttataaaataaagttttattttattacaatttagtttccgttttgtaattaaaatcttaataaaacataacaagaacgctttagattgttttgtaacagaaagtaattcataccaaaaaacaccaagcaaccgaaacgttacttggtgtcattacaaatgtaatattattttaaattatgtcactactttaaatactttttatttccaaaccttcatcgccccatgcgtgcatgccgccttcgacatttacggcatcaatgccatttgcctctaaatattctacaactttagcgcttcgaactccaccagcacatacaatataatatatttcatttttattaaatgaatttaaattatccggaatggtatccattggaattaactttgcattaggaatatatcccattgctgtttcttcatcagtacgaacatcaacaatttgaactggtttagattctaaaagtttattttttaattcatctgtagtaattgacttcatttcaaagtcctccttaaaacattatttagctacaatattgactaatttttgaggaacagcgatgactttcatgatgtctttaccttcaatactcgctttaacattgtcattagataaggcaatttcttgcatttcttcttttgatgtatctttagcaattttaattttagctctcaatttaccattcacttgaacaacgatttctacttcatcatctacaagtagtgcttcgtcataagttggccaaggttggtacgtaatagactcttcatgtcctaattttgaccataattcttcaccgatatgtggtgcaataggtgctaacattttaacgaagccttcaatgtaaggtttataaacttcatcaactttataacactcattaataaataccattaattgactaatagcagtattaaatcctaatgtttcaaagtcttctgttacctttttaacagtttggttataaactttatctaaagatttattatttgtagttacaatttttgaactcaatgtcccatcttcatttaccattaaacgccatacgcgatctaagaatcgacgagacccatctaatcctttttcactccatgcaattgcagcatctaaaggtcccataaacatttcgtaaagacgcaaagtatctgcaccatgagactgtactatatcatcaggattgattacatttcctttagatttactcatcttctcattaccttctcctaaaatcataccttggttaaataatttttggaaaggttctttagtaggtacgatagccaaatcataaaggactttatgccaaaatcttgcatataataagtgaagaaccgcatgttctactccaccgatatataaatcaacaggtaaccaatgttttaatttttcaggatctgctaacatattttcatttttaggatcgatgtaacgtaaataataccaacaactacctgcccattgtggcattgtatttgtttcacgacgtcctttcatacctgttttttcatctacaacatttacaaatgaatcaatattagctagtggagactcaccagtccctgatggcttgatttcatctgtttcaggtaacaacaatggtagctcttcttcaggaacagttgtcattgttccatcttcccaatgaatgacaggaattggttcgccccaataacgctgacgactgaataaccaatctcttaatttgtaattaactttcttttcgccagcacctttttgctctaataattgaatagctttagtaattgccgcttcattttctaaaccatcaagttcaccagaattaatatgtttaccttcaccagtgtatgctgcttcttcaacatttccaccttcgatgacttcaatgattggcaaatcaaactttttagcaaattcataatctctgtcatcatgcgctggtactgccataattgctccagtaccatatgttgataatacataatcagcaatccaaatttgtactttttcaccagataaaggattagttgcatatgcaccagtaaatacacctgatttatcttttgctaaatctgtacgttctaaatctgactttttagaagcttctgtttgataagcttttactttttctttatattcatctgttgtaattgaattaactaatgcatgttcaggacttaagactaagaatgatgcaccatagattgtatctggtctagtcgtaaatacttctacttttccttccgtattatctacatcaaatgaaactttggccccttcagaacgtccaatccaattgcgctgcatatcttttaaagactcaggccaatctaaatcatctaaatctgctaataattgatctgcatattctgtgattttaagtacccattgtttcatcggcttacgataaactggatgtccaccacgttcagagacaccatcaatcacttcttcgttagataaaacagtgcctaatgctggacaccagttaactgcaacttcatcaacgtatgctaaacctttgttatataactgtatgaaaatccactgtgtccatttatagtattctggatctgttgtattaacttcacgatcccaatcataactgaaccctaattctttaatttgtcgtttaaaagtttggatatttttctttgtaaattcacgtgggtcgttgccagtgtctaaagcatattgctctgctggtaatccgaatgcatcccaccccatcggatgtaatacattatatccttgcattcttttatatcttgaaatgatatctgttgctgtatagccctcaggatgtccaacatgtaaaccagcacctgatggatatggaaacatgtctaaagcataaaatttcttttgacctaagttatcatttgttttaaatgttttattttcgtcccaatagtcttgccatttcttttcaatttgattgtggttgtaattcaacacatttcctcctattcaataaaaaagacacctctaactattctatttacatagggacgacatttgccgcgttaccaccctatttcacaaaaattgtgcactcattttaatagtaagagatgtcattcattcaatttaaaattaatacgatttacatttagtccttaacactagctctcagcatcactagctttctgtagaaaagctccaaacgaaattaaattatacaaattaatattatgttataacgacatttatttcaagtctataacgttaattctatttactcattatgcatctatttttttaggttgcgtattattctccttgaaaaccattaataatattaatgcaaatacaagtagtagcatcataccgataaacatcatgcgcatattaaacgcatcaactaatacaccaccaagaaatggaccaaatgcttttcctactgtagcagctgaattcacaaaaccttggtactgtccttgcttaccatctggcgctaactgattggctatagttggaactgctggccatacaaacatttctccaaaagttaaaataatcataccgacaacaaatattgtaaagttttcggcaaaactcgtgacaaagaacgacaacataaaaatgatgatgccgacaaacatttgcttctttaagtttccttttaacagatagagaatcggtttaattaatggttgtgctactaaaatcattattccgttaattgtccataaaacactatattgtgccattgaaatattaatagattgtgtaaatgaagcgattgtagactcccattgaatatatgcaacccaacaaattgcaaacattgcacaaattagtactaatgaaataaatcttgctttattctttttaccagtaatatctaaatgagttggatatttaactttcgcattaatttcaatattaaattgcgttaccgcgacaagcgcaaacacaacatacataataagattggctaaaaagatatagttaaagctaaattctgcgacaaagccgcccattgcagcaccgacagccacaccaatattttgcgctaagtatatcgcattaaacgtttgtcttccgccatttggccacactgctccagccatagcgtatatcgcaggaataatcattccgccaccaaaccctaacattacaagccatacagcataccaaggccacccgtgaaagaaattaagtagcgttgtactacaaagacaagtgaaagttccaattaaaatcgtcttgtatccacctaatttatcaaatagtgaaccacctaataagtttccaataaccatgccaaatgaatttatcattagcactaaaccagcaacagttaaactttttccaagttcttgtttcatataaattgtatttaaaggccacaaaaaactggaaccagtaatatttaacgccatgccaattactagccaccagactgatttaggtatattcatatttcatagttcctctctcttttttgtcaaactataataaacactataacattaaaatatgttaaaatctgtacttagaactctttttttatagaaaggaaaatgacatatgggcaatcatttccaatacgcttttgaaaacaaacgttatcacacatggaattaccatttaaaaaataaatttggacaaaaaatatttaaagttgcattggatggcgggtttgactgtcctaaccgcgatggcactgtagcacatggtggatgtacattttgttctgctgcaggtagcggagactttgcaggtaatcgtgcagattcaatcgcagtacaatttaaagaaattaaagaaaagatgcatgagaaatggcacgaaggaaaatatattgcttattttcaggcatttacaaatacacatgcaccggttgaagtattaaaagaaaaattcgaacctgtacttaaagaaccgggtgttgtgggattatctattggtacgcgtcctgactgtctaccagacgatgttgtcgaatatttagcagatttgaatcaacgaacatacttatgggttgaattaggactacaaacaatccatcagtcaacatctgatttaatcaatcgtgcccatgatatgaaaacttattatgatggtgtggcaaaattacgtaagcataatatcaatgtatgtacacacatcattaatggcttacctggcgaagactatgacatgatgatggctactgccaaagaagttgcacaaatggatgtacaaggtattaaaattcatttacttcatttgttaaaaggtacaccgatggtaaaacaatacgataaaggtttattaacttttatgactcaagaagagtacacaaacctagttgtggaccaattagaagtgattccccctgaaatgatcgttcaccgaattaccggtgatggtccaatagatatcatggtaggtccaatgtggagtgttaataaatgggaagtattaaatggcatcgatgctgaattagcacgtagaaattcttatcaaggcttgcgttacaagtctaaggtgaagcaatgaaattagaacgtatactccctttttcaaaaacacttattaaacaacatataacaccagaaagtattgttgtagacgcaacttgcggtaacggcaatgacactttatttttagccgaacaagtaccagaaggacatgtttatggtttcgacattcaagatttagctttggaaaatacacgtgataaagttaaggatttcaatcatgtttctttaataaaagatggacatgaaaatattgaacatcatataaatgatgcacataaaggtcatattgatgcagccatctttaacctaggttatttgcctaaaggtgataaatctatcgtgacaaagcctgacacgacaatccaagctattaattcattgctatcattaatgtcaattgaaggtattattgtacttgttatatatcatggtcatagcgaaggacaaattgagaagcatgcattgcttgattacttgagtactttggatcaaaagcatgcgcaagttttgcaatatcaatttttaaaccaacgtaatcatgctccattcatttgtgccatagaaaaaatttcttaagcatttgctgcgctatactatttataatttaggattgagtagtcaacatttgaaaaattaatgccaacaacaaaaagaggttttcaacttaatgaaaacctctttttatgctattaaacttacacagcaataattgcgtttaaactattttgcattgctgttgctctacttgcaatcgcatcactgatgaaattcaacaactctactttctcttgttgtaacttttcattgaaatgaataataactgttctttcatcgtcaacaggacgctctttgtaaatccattctaattcaactaaattattatacgttctcgtacgcttatacggtttaacttcaacaaatctgtccatttctttaagcgtcatagaacctttttgccataaagttagtaaaattaaaatttcttctctagacattttgtattcgctttcaatctcgctgaaaattgagttaatgtcacccaaaagtgtttctaattgcaaaattccaaatacagtgtcgttatttacttttttcatgctaaacatctcccaattaataatcacatatttagctactatacaagtattaacaaacatcccaacaatcccaaaacttgtatgtgctaacttatgcataaaactacaagtgtaaataaacttgctttctattcaattgtcaaagttgaataaaattaaataagtataaaaaccaataatcaatagagttaatatttagaaataagataatagtacataaaacaaatcactctattacatattaattttataatttatatacaaagaaaatatatcaatattaccattaaattgcaacaattctacatatatttcttcaaaaaagatacgcattgaatttttattacatataactctcatgaaaattgattaaactaaattaattagttagccttaaatttaacaaattaaatcaaaccgaatgaggctaaattggttatttttcaagatatgatttgtataaatcaaaacatttcttacaaatcaaatgtgtataaaatgtgatatacattttcaaccttaaaaaagttctaaaaaaagatgagcatctactgtctcatctttcagttcttttttacgggtctgttttctaatttgagcacaatcttcgatttctttatctaaatgactaccaattaaatctatttcttctattgttaaatcgctatctccatcttcttttatctctggtattattttttcttcaactaagtcacgatatagtgtttttgaattctcgttcaatttcgattcgtgattttgaatactttcttccgcaccaatgtatatctattggcactagcttctacttttgtaccatcaataaaaattgaattatcatcaataagattttgctttaaacattgactatagaactgaataaataaagattcaattaacgcatcagtattaggattcactctaaaacgattaatagttttataagaaagtgtttgatcttgggctaaccacatcattcgaatactgtcatgaagtaatttctctattctacgaccagaaaatacagattgagtatatgcatataagatgatttttaacatcatttttggatgataggatgttgcaccacgatgatgtctgaattcatcgaattcgctatcaggtatcgtttcaacaatttcattaacatatcgcgaaatatcattttgaggaattctaacgaagtttctattggtagtgtaagttggggtcatgttataatttttatacataaggcacctctttaatttagtttagtagtatttattaaattatacgaagggacccaacacagaaaattcattttattgaattttacatttatgtgcaagttgggaaaaatgtcttattttttcaaagtatttaaaagtaaaattacatgttaatacgtagtattaatggcgagactcctgagggagcagtgccagtcgaagaccgaggctgagacggcaccctaggaaagcgaagccattcaatacgaagtattgtataaatagagaacagcagtaagatattttctaattgaaaattatcttactgctgttttttagggatttatgtcccaacctttttagaatattaaatttctacaatttcgtcatcttcaacaataaagcccattgtattgacgctgttatttaagaaagtcagaatataacgcattacttcatcacgttctggctcattgtgaacctcgtggtaaaaaccttgccaagctttaaaatataattcaggtgtttgatatttttctttaaactcatcaattgccctagtatcaacaattaaatccttcgttccatacattaatagcgttggcattggttgaatgtcatgaatatgagccatcgtatctttcatcgtctcattaattgtattataccaatgatacgttgctttttttaacattaaaccatcgttaactgtttcttcaacaatttctaaattacgtgttaaatcttttggttctacaccaacattaaaacgtgtgtcttttgaaattttacctatatttgaaacaagtttatctttacgattttttccattcttttgaagttctagcataggagaaattaacatcatcccctcgattggcaattctactttttcaagtaaatttaataaaatcaaaccgccaagtcctacccctaatacataagtaggaattttatattcattagctatctttaaccagtctagcaaactttcgtgatacgtttgaaagttttcaatttgtcctttattagctcttgaagtttgaccttgaccaggcaaatctcccataatcacatgatagccatttcttcttaacatcgtaataacatatgcatatcttcccgtatgttctaatatattatgagcaataacaacgacgcctttcgcatcattttcagcttcccacttccacattattatactgcccctttttcattaatcttcaataacataattatagcaaattcactatgtagatttctatttatagtattattgttgtccatattattatatataaatgaaatcaacatcaataatagtgtaattatacataattatttttgattgtttttgatgaaaacgctttctcgaatatttttttcatgctaaacttattgtaaacacaagggtttggaggagtagcaatggcactattaaagaatttttttatcggattatctaataatagttttttaaacaacgcagcaaaaaaagtgggcccacgtttgggcgccaataaagtcgttgccggaaatacaattccagagttaattaatacaatcgaatacttaaatgacaagaatatcgctgttacggtagacaatttaggggaatttgtcggtacagttgaagaaagtaatcatgctaaagaacaaattttaacaattatggacgcgcttcatcaacatggcgtaaaggcacatatgtctgttaaattgagtcagttaggtgcagaattcgacttagaattagcttaccaaaatttaagagagattttacttaaagcaaatacttacaacaatatgcatataaatattgatactgaaaaatatgctagcctgcaacaaattgttcaagttttagatcgcttaaaaggcgaatttagaaatgttggtactgtaattcaagcatatttatacgatagccacgaattagttgataagtaccaagatttacgattacgtttggttaaaggtgcatataaagaaaacgaatcaattgcatttcaatctaaggaagacgtagatgcaaattacatcaaaataattgaacaacgtttgttaaacgcacgcaatttcacttcaattgcaacacatgaccatcgcatcattaatcatgtaaaacaatttatgaaagaaaatcacattgaaaaagatcgtatggaattccaaatgctctatggttttagatcagagttagcagaagaaatcgcaaatgaaggctataatttcactatttatgtaccttatggcgatgattggtttgcgtattttatgagaagattagcagaacgcccacaaaacctatctcttgctgtaaaagaatttgtgaaacctgctggcttaaaacgtgttggcataattgcagctttaggagctacagttatgttaggtttaagtacaattaaaaaattatgccgtaaatagagcaagacataaacaataatttaggagtctggaacaataatcaatgttctaggctcctaaatgttatattggcagttctgaaacatttataaatctttgattatgaactcacaacagtgctctatgcttttatagattttaataaattagccatttcaattgcacttactgctgcttcagcacctttattgccagctttcgtacctgctctttccacagcttgttcaatactttcagtcgttaaaataccaaatatgactggtacattagtttgatcattcactttagaaacacctttcgcgacttcattacaaacataatcataatgagacgtagcaccgcgaattacgcatcctaatgtaattactgcatcataatttcctgatgaggctaattttttagctactaaaggaatttcaaacgcacctggcacaaatgctacatcaatattgtcttcattaacatcatgtcgaatcaaagtatcttttgcaccttcaagtaatcttccagtgataaaatcattaaatcgactaactacgattgcaactttcaaatcttttccaattaatttaccttcaaaattcatgttaaaatcctcctatattaaatgacccatttttatttttttcgtttccatataatcatgattatgtaccgtttctggtacgataacttcaattctttctgcaatatcaatgccatattgttttaatccctcaaatttacttggattattacttaataaattgatatgttcgatgttaaaatattttaaaatctgtgcagcaatatgataatctcgcaaatcttcatcaaaacctaatgctaaatttgcagttactgtatcatatccttgctcaattaattcatatgcgcgtaatttgtttaacaatcctatgccacgaccttcttgaggtagataaataatcatgccaccatgttcattgatatacttcatagacgattcaagttgagcaccacaatcacaacgttgactatggaaaatatcgcctgtaaggcacgcagaatgtaagcgtacattttcatgttgtcgaattgcaccttttgtcagtacaactatctcttcatctgtgtatgtcgctttaaaaccatacatatcaaatgttccgaaatctgtaggcattttcacttttgccttaaattcaatttctggttctaattttttacgatattcaattaaatcatcaatcgtaatcatctttaattgatgtttttctttaaacttttgtaaatcttgtcctttcgccatcgtgccgtcatcattcataatctcacaaatgacaccagcgggcttggcaccagtaagtttagctaaatcaacagccgcttctgtgtgtccatttctagctaatacgcctttatcttgtgctactaatggaaataaatgaccaggacgattaaaatctttagcttcactactaggatcaatgagctttttggcagtcaatgtacgttcataagcactaattcctgttgttgtatctacatgatcaatactcactgtaaattgcgtaccaaagatgtcggagttatcatcaaccatttgtaccaaatccaaacgttgtgcaatatctttagacactggtgcgcatattaatccccttgcttctttcgccataaaattaatggtattatcgttcatccattcagtaaccgctactaaatcaccttcattttcacgattctcatcatctactacaataattggttctccattttttaaagccattaaagcactgtcaatattatcgaattgcatgctacccctcctaaaaaccaaatgctcttaatttatctacagataattggtctttatctttatttaaaatattttcaacatatttaaacaaaacgtctgtttctaaatgtactttatctcctaattttttggatgataaaatcgttgaacgcctcgtttctggaataagatgaatgtcaaaactgttatcatgcttatcaaataccgttagactaacaccatccacagtaatagacccttgcttaactaactgattattaatatgttggctacattgaatcgtaataatttttgcattggctgtttcatttatttttgaaactgttcctagttcatctacatgaccgaggacaaaatgtccaccaaacctaccgttaccactcatggcacgctctaaatttacttctgattgtcgcttaacatctgctaaataggttttattttcagtgcctttaattacttgaacagtaaaagatgtctgattaaaatcaatcactgttaaacatgcaccattaacactgatggaatcaccaatatgcatatctgccgtaatcttatgtgcttcaatttcaatcgtcctgactgattgacgaatttgaacacttttaacgacacctatttcttcaacgatgccagtaaacatgcatcatcacttctttcgtaaagttaatttaacattttgatttaataactcggaatgaacaatttcaaattggttcgcatctggtatctcaatcacatcatttgtttgataaaattgataatttccagatccgccaattaatttcggggcataatagagaataaattcatctatataattagattggagaaattctgaagtagtggttggacctgcctcgactagcaaagttccaactcctcttttatataaattgtgaagaattgttgttaaatcgcaagacttcaagtaaataatttcaatatgtgtttgattggttgttaaatttggattttcagtatatatccaaattggtgttgattcatcttgataaatttgctgattaaaatgaatattcccagacttagacaatattacttttatagggttttttccatcttgaatacgtgtagtatattgtggatcatctaattcaactgtacgtcttccagttaacactgcgtcgtgtcgatgtcttaacttatagacatcttgtttaacctctttgttagtaatccattgactttgtccattatcattcgcttgtttaccatctaaacttgcagatactttcactgtaatttgtggcagttgctttgcttttgctttaaaaaagtcttggtataattgtgatgcccgttcatcatcaacgcattcaacctcaataccgtgagcccgtaacgtctcatcaccatgtgtgtctaacgaattgtcttttgttgcgtatactacttttgctatcttacaatcaattattttgttaacacagggtggtgttgaaccaaaatgactacatggctctaacgtaatataaatcgtcgcaccttcagcattttgttgtgccatatcaagtgcttgaacctccgcatgcttgtcaccttttctcaagtgtgcaccaataccaacaatcctaccttctttaactacaacagcgccaacgggtggattaacacctgtttgaccttgtaccatatttgcaagttgaatcgcataatccataaattgactcaaatgatcacctctataaacaaaaatcctcacatcatgaattaagatgcaaggagaaaaatttatcgttaaataagcctatttgtacacatttttacaaatacgctacattatctttgtcgataattaacattctttctcccatccagactttaactgtcggctctagaatctcactagatcagccactaatatgaaacatattagcaggtcgcaggctttatttactgccggttgggaatttcaccctgccccgaaagaattatatatgaaattgttatagattatttgagtacgtagtatgtcaactacatttaaaatgatactatatgttttctgaaaaaacaattaatgacggttttaatttaatataatctgagtactataggcatctcattgatatgattcttactaacagacattaaaatcaaaccttcaattcgtctctatagagcgttctctttattatcttctagttacaaattattgattgtcactgcgctgttgttgctcattcgattctaaagcatcatataattgagatactgtatgcgcaacttgttctacaatcattttcacaccgtttcgtagtttattaacaccgtttgtcatttgacctatcgcaatcatatttgttaatgttccaaaccttggactaataacttgattggtttccggaatgatttgtatgcctcccattgggtgtgcttgtacaatttgtctattttcaagatttctaattaattgatcatcttgatccaattcatttaaatgactttttgcacctgtcgcgttaatgacaacattatatatgtctactgattcttggtttttgtatgaaaaataatacaacttgccatcatgtttcacatcttctaaatcttttttcaaaattaaagacttattttctattaattcaataattagttcagcagttcttggaggcattggatttgaatttaattgaatcatctttgagtatttttgattaaattgatgttggtcttcaatacttaagctattccatatccaatttaaattctctttcaaatgttcaatcatactttggaaaatgcccatttctgttggacgcgctaaatcatacttcaaatctgcaatatgatttcctgtacgtctatgtactaattttttaaaatcaatgtcatattcagcacattcttttaaaaataaagaaactaaagtatcaagcggtgcattgccgaaatgatgttttttaatgtcatttaatttgtctttagttaagtacttgaatgtcacgtctatcattgtacctcttacacttggtaaatgagcagaacgactcgtcatagtaattggtaattttggatgatgagcagcaacataacggacaacatctaaactggcaaggcctgtaccaataatcgcaatatcgtccagttcatttacttcgtctaacgtattatatgttggataaggcgtagcgatatatccttttttaccctttaagttatatggatcatggtaggcaaatgtaccacatgttaaaaatacataatcgtacgcttgccatgattgtcctgaatttgtagtacatatgtaataagttaaattcgtttcatcgatattagaatttgtataaatctcttgaactttattataattagttgatatatttggatattttttcgtgaacatagataaataagatttcatataatgtccgaatacaaatctcggtaaatatgcaggttcatcaaaattaaaatcagtttgttgtttataccacttccaaaattcagtctcatcatctaaatttaaactcatctttttcgaaggcatattaattagcagctcagaactatcattttgaaatggtacgccctgtcccatatttactttatcatcgtataaatctatatctaattgattaaacttcgggtgcttaactaactctctcaatacacttacaccagcagttcccatgcctattattgctacacgcatatatcatccatccttttgtaattcaaaatattatatttaaactattacctataattatagcaatttggtatttccaataaaatttattaaggtaagctattatttcactttcacaaccattaaaccatttaaaacttttcatttaatatcaaccttagtgtttgtgttaaaatatttttaacgaggtgaattaaattgaaatttatagcaaagatattaatctcattagtaattctatttatgatttttagtcgtaaaaacaaagcttcttaatcaatacccttgattacaaaataaattcaactaaggtgattggccatacactcaagatatggctaatcacctttttcaatgcagaacaaagagtatattttgcaaaatcaatatctataatttatctttaatacccttttaatactaaaaccaaatttaaattacatagtcatatcgtgtaatataccaaaggaacatagacattcatctatatagatgataatctatttaacgtctaggaggtatgttatgacgtataaagaactagcaacatttttaaaagttttatcagattcaagcagattagaaatactagatttactttcttgtggagagttatgcgcttgtgatttgttagcacattttcaattctctcaacctacacttagctatcatatgaaagcattagtaaaaaccaacttagttacgacacgaaaaatcggaaataaacatttataccagctcaatcataatatttttgagtccgtaattaataacttgtctaaggttcatacctctaaccaacgatgtatttgtcataaccttaagactggtgaatgctaatgatgacaactttagcgacactcatttttctagtaactttattatttgtattatggcaacctaaaggcctagatattggcattaccgcactaactggtgcctttattgctgttattactggtgttgtaagtttttccgatgttttcgaagtaacaggtattgtttggaatgctactttgacttttgtctcagtcattcttatttcattaatattagataaagttggattattcgaatggtcagctattcacatgcttcatgcttcaaaaggcaatggtttaaaaatgttcgtttatatcatattattgggtgccattgttgctgcatttttcgcaaatgatggcgcagcgttaatcttaacgcctattgtattagcgatggttaaaaatataggttttagtaagcgggccatattcccttttattattgcgagtggttttatagctgacacaacttctttacctttaatcgtgagcaatctagtgaatattatatctgctgattattttcatgtaggattcgttcgatattttagtagaatgattatacctaatttattctcgcttttagcaagtattatagtattgtggttatattttagaaaagcgatacctaaaacgtttgatgataataatataaagcatcctaaagatgccattaatgatttaaagctatttaaaatttcatggattgttctagttatattacttttcggctatctaatcagtaaatttactaaaattccggtatcaattttcactggaatcattgcttttatttttctaatgttggctcgtaaatcaaatgctgtaaatattaagcaagtcattaagggcgcaccttggaatatagtattattttcaattggtatgtatatcgtcgtattcggcttaagaaatgctggcattactttaatattggctaaaatattagaatatatttccaattacggtctatttagcactattttgggaatgggcttcatttcagcgtttttatcatcaataatgaataatatgcctacagttttaatagatgcgattgctattggtcaatcaaatgtccatggcatgttaaaagaaggcctaatttatgcgaatgttatcggttctgatttaggtccaaaaattacaccgataggctctttagctacattactgtggttacacgtcttaacacaaaaagatgttaagatttcttggggcacatactttaaaactggtatcatcattacaattccagtactatttataaccctcatagggttgtatctaacacttatcatattttaattaattaggagattgttatgactaaaaaaacaatttattttatatgtacaggcaactcatgtcgaagtcaaatggctgaaggttgggctaaacaaatcttagcggatgattggaatgtatattctgctggtatcgaaacacacggtgttaatcccaaagcgatagaagctatgaaagaagtaggcattgatatatcaaatcatacatcagatttaatcgataataatattattaaaaattcaaatttagttgttacattatgtagtgatgcagacgtaaattgcccttctttaccaacaaatgttaagaaagaacattggggatttgatgatcctgcaggcaagccttggtcagagttccaacgtgtaagagatgaaattaaaatcgcaattgaaaatttcaaatcacgatgagagtgggacagaaatgataaaaaaacactaatgatttattatgtagtggttctttatcattagctataactaatgtgtacttaaaaataggaatacatgagtaaaactcatgcataagaaatactaatttctaaagaaaaagtaattctttatcgatgtcctgccccacttgcattggtgggattatcaatcaatgtgttttctctaatgcaaaaagacgctttctatcaaaacaagatagaaagcgtctttttagtatgtccgagtcataaaaacaactcgtagcttatcaaattacttattcaaatgtttactgtcatctttatacacaaagtatttgaagtattttccttcagtcttcatgttcttataaaagtcagcgataattgttgcattactttctgcccacttaatatctgtagcatattgatgttctcctggattttttggattccatctcatactatacaatgtattttgatctgtgcttgataagaagtgcttatgaatgaaatcagcaccgcctgaaatagctttttcaggtgtatcccaaccatgctttttagcatattctgcacctgttttaattgggtctttatcaagggctcctactccatagaaattgtagtactttttgccatcaatttcgactccattagctaattcacttttaactgcgccagtttctaataatgcatgtgaaattaaataaacttcgttaacgtgcttatctttagcagcttttaagaaatcatccgtatgtttcaataacgttggtctatctactaacatacgtttaattctatttttatcaatcccttgatactttgataaatctaaaaattgatatttttgcttttcattatcgataaaagtaccgctatccattgcacttttaatttcagttgcagatgcatctctccatgcatcattctttttatttgatacctgttgactcgtataattatttatttgtttctttgctgcatcgtttaatgtaacatttaacttttcaatcttaatgtcggatttaacatgtttgaaaaatatctgatcggatatcattgagaaaaaataaaaatgagacaacagcaaatatgacaacaagtcctattattccaaaaatagaacctttcttgtgtttattcatatccacacctcttaggtcattgttgttatacattcagtttgactacgataataaagtttaacattattaaaaccgtttaacaattttatctatgcattgttacatattcataaataaacagtaatgtaaatgaaacgttttaaaccatttatcaacattactttacgttgatctacgaatcataaatgttttatctttttgtataacctttgaaaacctttatatcaataatcttattattcacgtattaaaaaacaaaaaattcttttgttcgtttacttagtttcttttttataatccatcataataaaacttgctgcatttgatctatttttataatagtactgatttaaatcaatcgtgccttcaatttgaccatcacgatacatcatttcattagtgaagttatttatcatcacgaaatcagcgcgatctcttataacatctaaatcgtcgtttcgtgcaaaaaaatgttctaaatttaaatgtgcgtaatccattgttacctcccgattacaaattttgttctatctactatttagcaaagtaataatacatcatatcacattaaattaattacttatgtcttatatttaacacttaatttagcgattacgcaaatgaatgatttttctaaatattttattctaactttatccggaaatatttgttatacgtataacttggagaatgactacttgaaatttaatgacgtatacaacaaacaccagaaaatcatacactatcttttaaaaaaatataatattagctataattatgatgagtattatcaactactcttgataaaaatgtggcaattgagtcagatatataaaccctcaagcaagcaatctttatcctcttttttattcactcgattaaatttttaccttatcgatttattcagacaacaaaatcaattaaaagatgtcattttatgtgagaataattcaccaacattaactgaacaaccaacatactttaatgaacatgaccttcgtttacaagatatcttcaagcttttaaatcaaagagaaagactatggctcaaactataccttgaaggatacaagcaatttgaaattgctgaaatcatgtcattatcgctttcaacgattaaattaattaagatgtccgttaagcgtaaatgccaacataattttaattagtttattgtgaaatttcggtcgatgtgttaatgatgttgaaacaccctaacatcttcatataaatttattttaaccattaaattaacaacttattaaacgaggagtactatatttgcaagacaattctactaaatatctactttatatccaaactgctacttcaaaccatctcgaaacaaattgtgtctttttacattgcgattacattcttaaagttccaattaacaaactcgtttcatattatgcgaaattgcatttatcatcacaaagtgtgctaattgagactgcaaaaaacatactaaatattaataaactggttcctatttacatcaacccaaaaactatactttttccgttaaaacataaacgtgcaccgatacaaatttatatcaatgcacattatattgttggtatgactgccatagagaattcaacattaatacattttcaagaaggcattcagctagaagttgatgagccattttctctagtttcaaaaaaatgtcatgaaagtttagctttgaagcacttcattgaaaatactatttcgaattaaatttaatttctaaaagtttcttagtaaagtatgatgtcacaatttttataaaatatatgctagcaaacattaataaaatcgctccaataattgttaaaataacaacagttgtagataaatctaccttaggactaacgaaaaattgtacgccagatagacttgtaattagcccaaataaaaacaaacctaataaagcaacataagcaaacatcatcactactaatgtaacaaacatactataactttttgtttctttatttcgaaatacattttgtcttaagtaagcattagcaaaggtaacaggcttatttaagttaacgctgtcatcatcagatatagaagacaatcgttgatctaatgcttgtttctccttcttgttcaaaaaccataattgctttttaacttttttatcaaatgatgctttattcataattaaggatttctctcctttataatattgacgtaattttaaacattagcgtcaattgaaagtgtattttatatattttacagaaatatatgtatcaaatctacaaaaatccatattacaatttcatttatggtgatttgacgctaaaatacagtctgctaatttttcaaactaatgctttttaggtaggtacaatgataaattttaatcgtaaatatgtttcatatattatgaatctagccttaatcatattgcattcaaaataattttaaaaaatgaaaagaaaggatttagcatgcaaaaattcaaagactttttttacgatgatttatcggttacacgaggaaattattttttaactttaatggcagcattttttattactatcattttatttatcggcatagttgtcagtgaagtacatttactttatagcatgctaattgtattagtaggtttaattctattgaggctattcaaaatcaatttattctcttttaaaaaattaacattgtctcaagttatttatattataggcggtgcactattaatttatgggttagataatctttatttatattttcatgacgtaccggcaaatgaacaacaattagagcaagcaatacgaaatacaccattctatatttctattttcactgttaccatcatccccgctattgtggaagaaattgtttttcgcggtatgataataagggttatcttcagaaaacacttgtttttagggttaattgtgtctagtttagtttttgcatcattacacgaatctgacacttggattggttatttaccttacttatattctggtttgatttttggcctaatttatataaaaacaaaacgattagaagttgtaatattcatgcacttcttaaataacttgttagctctgctctttataatatggagataattttgagataacctttcatattattttcaaattatctatctgatatttattttattgaacttgagtcaccacttaaactcaaaaatacgtgtcatcaagtgcaaaataatttagaactaatacaaacataaaaacttttactttacgcttaaaatcaaaagtcacatacctagatataagtacaacttgtatattttgtactctaataggtatgtggcttaaataatatttaattcttgagttgcatatagtaactgtttttattcattttctaaaatatgcaagactaatttccttttctactcctgttgaatcaatttagacttttttataactcgagcttttacttagctgaattttgacttcttcttcattaataactatgatggaaaaacccccataagcacaatgcctatgagggtttaaatatatttatatattatagaatagaaagacctgaagattgaatatctttcgcaaagcctttaactgtatctactgataattcgttaatatcgcgacctaagtttgtattcacttttttcacaacatctgctgggcatgtaataatatctgcaccaatttcatcagcttgaatcacattgaataattcgcggcaacttgcccataataatttaacgccgtctttactatgcgtaacttttacagcctctttcattaatggtaatggatctacgcctgtatctgcaatacgtcctgcaaatactgaaacatatgttggcacaccttcagttactgcttcagttatttctttaacttgttcaattgtgtaaacagccgtaacgtttaatctcacattgtcagctgaaagttttttaattaaaggaatcgttgattcaccttttgtatttacaataggaattttaacaaatacattttcgccatattgttttaaaattgctgcttctttttccatagtttctaaatcgtctgcaaatacttcaaatgaaattgaagcatctggaatttctttcacagcttcttcagcaaaagctttgtaatctgttacgcccgctttagccattaaactaggatttgttgtaaaaccatccacttgtttgtttttataagctgctttcatttcttcaatatctgcaccgtccgcaaatacttctacatttagtttagccatataatatagcctccttgattcttattaaaattttaacaacatctgcatgtctttttcttacaaccatttgtaaaaaatgatttttatttctttgttatataaaacatttatatcacgcttttataatatatagctaattttttgcctatattttttaaaaatgactttagcaaacattgtgtctacaagttaataaaactattgttttatgattgtttatgatacgatatgtaaatgataatcatccaggaggtctagcatgtctcgttcaaaaaaatacttttacttatctagcttaatgattattttaagctttttctttaatacaaataacgttttcctaagtggactttttaattcttttattaaattaatacttttctgcagtgttattaactcaattgtactaattttgtctataatttttgcagatcgttcaattaaatcactaaagcctgatgcagattggattagaattgcgagtaaaagtttgccttggattattctaattgttattttagtacatatcttttcaattgttcgtacattcggttttatttaaaaaagttaatatgtcattgtagccttaatacaaaacaatacaatgtatcatgctataatgagtaaaacaatttgataacgttgttgcgtataaaaaatattagattttcgaaatcataactatgcatctaatcgctatagttatacaacaagatataacatataatgaggtttgataatgcatcgacaatttttgtcgtcgcgttgccaaaacctcttttttaaattcaaactacttcttttcgaggtgaaccaaatgcaatatgtatatatttttatcggtggtgctttaggcgctttattacgttacctcatttcttttctgaatactgacggaggttttccaatcggaacactgatagccaatttgactggtgcctttgtaatgggattgctaacagccttaacaattgcatttttttcaaaccatccgaccctaaaaaaagctattacgactggttttcttggtgctttaacgactttttcaacatttcaattagaattaatacatatgtttgatcatcaacaatttataactttactactatatgctgtaacaagttatgtctttggtattttgttatgttacgtcggtataaaactaggtggtggtttatcatgatatcaatcattttagtcatgattggcggcggttttggcgcaattgctagaagtgccattactgattattttaatcataaatttacttcaaagttacctatcgcaacattgatagtaaatctagttggtagttttttaattggattaactataggcttatcaatttcaatctcatggttccctgcgttctttgttaccggttttttaggtggcttaacaactttctcaacgttagccaaagaacttacactaatgatgacgccaaaatttaatattaacctttttctcaattattcacttttacaattcatcattggatttatagcttgttatattggctatcatatttaaaaataaaatgcttcattcagcaaataggtaaattacgacaccttcctgaacgaagcattttttaattttcatgcaaatttttaagcaccatataatgcctaccaaatttcaataatctttgttgccgtttaaataatgtgaatgtcaataaattctccaaactagtcgaaaataaagggagtgggacataaatccctaaaaaaacagcagtaagataattttcaattagaaaatatcttactgctgttctctatttatacaatacttcgtattgaatggcttcgctttcctagggtgccgtctcagcctcggtcttcgactggcactgctccctcaggagtctcgccattaatactacgtattaacatgtaattttacttttacatactttaaaaaataagacactttgcccaacttacactaccaatagaaacctctgttagaattcctcaaaatgatatttcgcgatatgttaatgaaattgttgaaacgatacctgatagcgaattcgatgaattcagacatcatcgtggcgcaacatcctatcatccaaaaatgatgttaaaaatcatcttatatgcatatactcaatctgtattttctggtcgaagaatagagaaattacttcatgacagtattcgaatgatgtggttagctcaaaatcaaacaccttcttataaaactattaatcgttttagagtgaatcctaatactgatgcgttaattgaatctttatttattcagttccatagtcaatgtttaaagcaaaatcttattgataataattcaatttttattgatggtacaaaagtagaagctaatgccaatagatatacatttgtgtggaagaaaagtattcaaaatcacgaatcgaaattgaacgaaaattcaaaagcattatatcgtgacttagttgaagaaaaaataataccagagataaaagaagatggagatagcgatttaacaatagaagaaatagatttaattggtagtcatttagataaagaaatcgaagatttaaatcattctattgagaacgaagattgtgctcaaattagaaaacagacccgtaaaaaaagaactgagattaagaagttcaaaaagaaatttgatgattattccgaaagaaaaaataaatatgaagaacaaaaatcgattcttaaagatagaaatagtttttctaaaactgatcatgatgcaacttttatgagaatgaaggaagaccatatgaaaaatggccaacttaagccaggatacaatttacaaatagcgacaaattctcaatttgttttatcctatgacctatttcaaaacccgacagatactagaactttaattccatttttaacaatgattcaaaataccttcggttatttgtagctgatgcaggttatggtagtgagcaaaactatatggccattatagatgattttaataaaacgccacttattacgtatggcatgtttattaaagataaaactagaaagtttaaaagtgacattttcgacactcaaaattggaaatatgacgaacttaatgatgaatttatatgtcctaataacaaaagaataggttttaaaagatatgcataccgtaatgatagatatggttttaaacgagacttcaaactatatgaatgcgatgactgttcagcatgttctttgaggcaacaatgcatgaaaccaaattcaaaatccaataagaaaatcatgaagaattataattgggaatactttaaagtccaaattaatcaaaagctttctgaaccagaaacgaaaaaaatctatagtcaaagaaaaattgatgtagagcctgtttttggatttatgaaggctattttgggtttaactcgaacgtcagttcgaggaataaataaagttaaacgagagctaggttttgtattaatggcacttaatataaggaaaatagcagctcaacgagctgtacattataaaatacatatcaaaaaagctgatttctatcaaataattaatagaaatcagcttttttacattgcctaagaacttaatgtcccaagccctgacaattcatctaaccttttcatcagttgagcgattttaatctagccttcaaatttttttggatcaggtccaattctcttatcttgatttaaaccatcaattcgcgtcatttgttcatctgataattcgaaatcaaatatttggaaattttcagagattctgtttggtgtcaccgatttagggattgtaaccacagcatgctgcacattccatcttaaaacaacttgggcaggtgactttcctaattcttgagcaatgtctttaattgtctcatcatttaaaatttgtgcattcatcaatggtgaccaagattccatcacgatacgttgtgctgccaaatataatttcaatttatgttgggttaaatatggatgatattcaacttgattaattacaggtttaattgacacttgtgccaacaaagcttccaaatgttcaggttcaaaattgctgacacctatatttttaacattattatttttatataaatcttccatacctttccatgtatcaaccattacggcttcgttcgtacctggccaatgtactagatacaaatctaagtattttaaacctaatctagataaactagcttcgtaagcagctgctacattttcacgaccgaaatcctcaaaatataattttgaagtaataaataagtcttctctagcaataccagttgactccaatccggcacgaatgccagcacctacttgttcttcattcccataaacttttgcggtatcaatactacgatatccttgttcaatggcatacttaacactttccatgcaattttcatcattttccacacgaaatgtccctaaaccaatttgtggcatcgtgtttccattataaaatgttttaacctccataaatatcgcctcacctttttgatgtattataccctgttatcataacaaatctgagttgaatacatgagaaaaaacacttagagcaatcaaccactaaaattctagtaatatctctcaaatattaatcaaattgtaaaagtaattctgtttaatttatgacaaactaaaaaagccgaagtaacaacatatagtcatcacttcagcctaacatttaattgaatgattcaattttatccatcatttgttgtaagtcttccacgttgtattgaatacgaccatggaatacaaatttgttaaagaactcgtctaattgttcagcaccgacaagcactttgacagcactattttgattataatttgaaatcgttacatcgccttcatttttaagattaaagtataaaattgaagttggtgtatatttggcacctaattctttttgtaagtcttcagccaattgtttaatcgcctcaatttgatctgaataatttacaaatgataatgaacgtttgtcatcattttgatccatcacaatagtttgcggtctagatttatctaaatccaatgtatcaaatacttgttccattggtggtaaatctttaaattgaccgccactaataccattataaacatgaccttttaacaattgagaatcaataatataaagaccagttcttgttaatactaaatgactaattcgttcaatattattaaagccatcctttggtaaaaagatatttgccataatgtgcatatcttctggtcgaattcgtttttctttaactaatctttcacgaataccaattaatctcatgtccgttacatattcactatgatttttcgagaacaattttaatgcgtcaatctcacgatcttttgtactaaccatgtgattataatcttcttgttgttttgtaattgtctttttattttgaatacgctctttctctaaagcttcttcatgagactttttaatgttttgttcttgttgttcatacttttcttctgtttgtcgcttaacttttttcttactacctaaggcaactaaaaaaaggacaaaaaagattaatgcaatgactactgcaataatgagtccaatgactatcggtgaagataaatccatcacaacaacgctcctttttaatatatgaataactttaattataatagaaaagctaaagattttcgatacatattatcatttatataccgaaaatcttttatttagctatattcaattcatcttattattttactgcgtcttttaattcttccactttgtctaatttttcccatgggaataagacatctgtacgtccaaaatgaccataagcagcagtttgtttgtaaatcggttgtttcaaatcaagcattttaataatacctgcaggtcttaggtcaaagtgttttctaactgcttcgacaagttgcccttcagaaactttacctgttccaaatgtatcaattgcaattgacactggttctgcaacaccaatcgcatatgccaattgtacttcacattgatctgctaaacctgctgcaacaatatttttagccacataacgtgcagcgtatgcagctgaacggtctacttttgtaggatccttaccactgaagcatccgccaccatgacgtgcatagccaccgtacgtatcaacaatgattttacgtcctgttaatcctgcatcaccttgaggtccaccgattacaaagcgtcctgtaggattgatgtagaatttagtttgttcattaatcaagttttctggaacagttggataaatgacatgtgctttaatgtcttcttgaatttgttcaagtgtcacatcctcagcatgttgtgttgatacgacaatcgtatcaatacgtactgggttatcattttcatcatattcaacagtgacctgaactttaccgtctggtcgtaaataatttaacgtaccatctttacgcacatctgataaacgttttgccaattgatgtgataaataaattgctagaggcatatacgtctctgtttcattcgttgcgtaaccaaacattaaaccttggtcacctgcacctgttgcttcaatttcttcttcgctatctttatcacgatactctaatgctttatccacgccttgtgcaatgtcaggtgattgttcatcaatcgcagttaaaattgccattgtttcataatcataaccatattttgctcttgtgtatccaatttctttaattgtttctctaacaactttcggaatatcaacatatgttgttgtagaaatttcgccggcgatcaatgccatacctgttgtaacagttgtttcacaagctacacgtgcatttggatcgtcttttaaaatagcatctaatattgcatctgacacttggtcagcgattttatctgggtgtccttctgtaacagactctgaagtaaataatcgtttgttatttaacatagtttgctcctttaaatttatattacgaaaattctctctctgtgagctaaataaaaaagaccttctaactattaatatagagagaaggcctaatacgtccattcgctcttatcgttcagacctatttgtctgcaaacggtttggcacctttcttttataaaaaagaggttgctgggtttcattgggtccatgtccctccaccactcaggataagagaatccgttaaaaataatagtacctaattaatgaattaatgtcaatttttcacaaataaatttacagtaaaatattgtagattaattatgttaatgtgttatactaattaaatgtaaaggcttacatttaaattatcgctttggagggatttaggatgtcagtagacacatacactgaaacaactaaaattgacaaattactgaaaaaaccaacgtcacattttcaactttcgacgacacaactttataataaaatcttagacaataacgaaggggtattaacagaacttggtgctgttaatgcaagtactggaaaatatactggtcgttcgcctaaagacaaattttttgtctctgaaccttcatatagagataacattgattggggagaaattaatcaacctatcgatgaagaaactttcttgaagttataccataaagtactagactatttagataaaaaagatgaactatacgtatttaaaggctacgctggtagcgataaagatacaatgttaaaacttacagtcatcaatgaattagcatggcataatttatttgctaaaaatatgtttattagacctgaatcaaaagaagaagctacaaagattaaacctaacttcactatcgtttctgcaccacattttaaagcagatccagaagttgatggtactaaatctgaaacctttgtcattatttcatttaaacacaaagtcattttaatcggcggtactgaatacgctggtgaaatgaaaaaaggtatcttctctgtaatgaattatctcttaccgatgcaagatattatgagcatgcattgctcagcaaacgttggtgaaaaaggcgatgttgcattattctttggtctatctggcactggtaaaacaaccttatcggctgacccacaccgtaaactaatcggtgatgatgaacacggctggaataaaaacggggtctttaatatcgaaggtggctgctatgcaaaagcaattaatctttccaaagaaaaagaaccacagatttttgacgcaatcaaatatggtgcaattttagagaacactgtagttgcagaagatggttcagtggactttgaagacaatcgttatacagaaaacacgcgtgccgcttatccaattaatcacattgacaatattgtagtaccatctaaagcagcacatccaaatacaattattttcttaactgcggatgcatttggtgttattccaccgatttcaaagttaaataaagaccaagcaatgtatcatttcttgagtggtttcacttctaaattagctggtacagagcgtggtgtgacagaacctgaaccatcattctcaacatgtttcggagcaccgttcttcccgttacaccctactgtttacgctgatctattaggtgaacttatcgatttacatgatgttgatgtttatcttgttaatactggatggactggcggaaaatatggtgtaggacgtagaatcagcttacattacacacgtcaaatggtaaaccaagcgatttctggcaaattgaaaaatgcagaatatacaaaagatagtacgtttggtttaagcattcctgtagaaattgaagatgtaccgaaaacaattttaaatccaattaatgcttggagcgacaaagagaaatataaagcacaagcagaagatttaattcaacgttttgaaaagaacttcgaaaaatttggtgaaaaagttgaacatattgctgaaaaaggtagcttcaacaaataaatttgaatactaaatcaaaaccacccgtgtgaacgggtggtttgttctgcggctataagccttccttactggccagccctaaaagggcactgacaagtcagccaactgcactactattccagcaaccctaaagggttactcttttttctttctttttttatttttctctccagtgaaaggatctaaatattcttccattgagatttggtctgcaacgatatcctcttgtaattgattacgaatataattttcaatcacttttttatttctacctactgtatccacataaaatcctttacaccaaaactttctatttccatatctatactttaagttagcatgtctatcaaatatcattaaactactttttccttttaaatagccaacaaatgatgataccccaagtttgggtggtatactaactaacatatggatatgatctttacatgcctctgcttcaattatctctacaccttttctttcacataattgacgcaatataatccctatatctttttttatttttccatatatcacttgtcttctgtatttaggtgcaaagacaatatgatacttacaattccattttgtatgtgctaaactgtttgtgtcagatgacattaaatagcatctcctcgtgttgattattttggttggctgaccaatatttattctagcacgtagagatgcattttttgtgacaatggtagaaccttttctgaaccatacgcatagcgtatggttttctttttacaattaaagagccaaccgttgttatagtctaacaatggttggctcctcttattttatgtgctaaaaatttataggcaattttattacaacaatgtacatttaaggtgaccttcatgccaaaatcgcatcactcatttaatggaagcagcacgtcttcatataaagtaccgatccctaattcaacgcatgtagtaccacatcttcaaagcttgatagttcccatgcgcacaccacgtttcatactagctatgcgactcaacttggttcataaactctttaatataagtcaatgtttcaaccatcgctggtggtcttggcacatgtccttctgccatttgataaaatgtttcatgcgtggcaccttttaactctagttggtccgctaaataatacgcatgatgaataccaacttgctggtctttccctccatgtacaattaatattggcggactgttttcattaatgtttggaatcgcttggcgtgcctcatatgccgctcgatcttttttcggatgaccaatcattcttcgtagcatgcctcttaaatcgacacgttcttcatacattaaatcaatatctgagacaccaccccagattgtataacttgttactggtaagtcttgaaatgtcaacaatccttgtaaaccacctcgcgaaaaaccaaccatgtggataaatgcatgtggatatttatcatgtagcaaccttaataattgcgtcacatcatttaaatcgccacggtaaaattcgtctttgccttcactcccattgttacctcggtagtatggcccaatcactaaagtttgactatctgaaaattgcattaatctacctgcgcgcacacgtcctacttgacctttgccacctcgcaaataaactacaatgcgatttacttcatgatgtggtgtcatcattaaagcttttacttgtaagtcatctgacaaatatgtaatttcttcgaattgatgcgtaaaatattcaattggcattcgtttacgtttgataaaacccaagtgattgcaccctctctacgcattttaaaatggtactatcttgcagtaagaaactccgttgtgcgagttcaatatcattgatacagttaaacaacactggccctgctgtttctaaataatcgttcttgcttaccaatgattcaacttcgataaaatatacatcttttacaaaatcagtttgatcatgtgtttcaatggtatattgtgctatgtaataaatatttttaactttggcgcctgtttcttcatataattcacgtgtaactgcttcagcactactttccccgcgttcccttttaccaccaggaaattcaatcccccgtaaattatgtttggtaaaaagcaattgatttttaaacgttggaatagctagcacatgattgccatctgctatctcattatcctttttaaatgtcaaattaacttgacgattatctttatccctaaacttcacgcgcatcacatccctacattgtatgttaatataatagttaattactatcgttggaggcattaattatgaaaaagatattcttggcgatgattcatttttatcaacgtttcatttcgccactcactccaccaacttgtcgtttttatccaacatgttcagagtacactagagaagcgattcaataccacggtgctttcaaaggcctttatttaggtatccgtcgtattttaaaatgtcatccgcttcataaaggcggctttgaccctgttccgttaaaaaaagacaagtcagcaagcaagcattcacataaacataaccattaatatggttgtaattgagttatatccactaaaggggggcgaaattcgagtcgcccctcttttaatatgcctgaatgcgccaccacatcttgttcaaaataataacctgctggtgtaacatctcctggataatcacctttacgagcaagcatcgctgtaaaatagcggcttaaaccatattcgtacatgccgccaataaccacttttgcaccatgacttttcaaagtatcaattgccgtttgcactttatcaatgccacctagacgaaatggttttaatacaacaactttcacattgtataattctatcaaattaattatgtccaacaacgatgttgccttttcatcaagggctattggaggtattgttccatccgctacttcatcaagcatggagatatctttaaatggctcttcgatataaagaacctgttcacgcgctaataactgtaactgtgtgaaatcttgacgatccaaggactcatttgcatctataaccaattgaaagtgaaagtctaattcccgtaacactctaatttgatgcatgatttgaggcgtccattttaatttaattctggtcggctttgttgcttttaatgactctagttgtttatttgataagccgctcgctgtcgctccatatgctactgaaaatgaaggcagtacatgaaacatttgatacaatgccatgacaatagttgcccttgcagcaggcgtattttccaatgaatctactaattttagtgctgcttcatacgtttcaaatgatttatttctattatcttcgaaccattgctcaattacatgtttcactgaggcaattgtttcatgatcataccaatctgtttgaaaagcgttacattccccgaaatatgcatttcctttgtcatcaatcaattcgataaacaaacaatcacgatgcgttaaagtgactttcggtgttacaatttgtgacttaaatggctcactatatttataaaaatgcaaagctgtcaacttcatcaaatcatcctctatacaacttatttctttgtaatttacctgttgatgtataaggtaaagtatcaaccttttcaaagtgtttcggtactttatatttcgctaaatgttgtgataaatatgcaatcaattgtgcctttgaaatgtcactttcactgacaaaatataatttaggcacttggccccaagtatcatcaggatgccctacacatactgcgtcactgatacctggaaattgcttcgctaccgtttcaatttgatatggataaatattttcaccgccactaataattaaatctttacgtcggtcataaatcatgacataaccttcatgatctatttcagcaatgtcacccgtattaaaataaccattttcaaacgtacccgttaaatctgttggatacaaatatacattcatcacattggcgcctttaatcattaattctccatgaccttctttattaggatttttaatttttacgtcaacattggcacttggcatccctacagtgtcaggacgtgcatgcaacatttccggtgttgctgttaaaaattgcgaacatgtctcagtcataccaaatgaattataaattggcaggttatattgtaatgccgtctctatcatagtggcagataatttagcaccgccgagtaatattttttgtaaattataaggttcatgtaaaccttgttgcataagccaatttaaagtttgtggcacaagcgaaatgtgcgtgattcgttcatttttaatcatcgttaaaatttgttcggcattgaatttatcaacaatgcgcacagtaaaaccttcaataacagctcttaaaagtacactgagacccgaaatatgataaatcggcaagacagatagccaattagtgtcacgatcaaatcccaagctctctttacatccgattgcactggcataatgattacgaaacgtttgtggcaccgctttttgagggcccgttgtccctgatgtaaacataatcgatgcaatgtcatctaaattaaatgatgtatttaatatgttggacggcgactctttcggcaccacagtttcattcgatgtttcatattggatacccattgtgttgtccaacaaactgttcgttgtaatatcccttccagcgaattcaatatcatccagcgatacaatttgaaaccctcgtaattccagtggcaaggtacaaaaaatcaattgtacatcgattgacttcatctgattcgtcatctcattaggtgtcaaccttgtattaatcatcgcaatttcaatatttgccaaccaacatgcatgtattaaaatgatcgattgaatcgaattatctatgtatagcccaacacgagattgttgataagccttgagtcttttagccaatagactcgcttcacagtataaattttgataagtataagattcttgaccgtctgttatcgcaatatgatgtccattttgttgtgcttgtttatataaccaaaagtccatgcgttattcctccaaaatcatttacattataattataacgattttatgacattctagcagtggttatgtttaaaaatataaaaaagtagacgaattgatgcattgatatgattgttataatgctcaatacatatcgttatatcattcgtctactattatcagttatttttatttaattttagtgtcattctgtcattttgatgtggtgatttacccattgttgccacatcatctgcaatgtcaattggtatacggttcatgtcttgtaatgcacttaaatggaatacttcatcatctaaattttcaatgagatatacataatatgttaccttgtcctttttatattttaacgttttccaaaagtccggcttgcaattcaatacattatccggaatatattcaataaataagtaacgtttgctgcctactttgtctatgaaatattttgcagtgcctttttctatacctcttatatgtgcatagtctgctgaaaagtaaatactacctattgtttcattatgttgttgtatttcaaatcgttggcctactattttattatttgtgctacaactacttaaaaaaatcagtagatatagcattaaacatattttcatccccttgaattttaaaaactttttcaaaagcaacacctctaaaaataaatacaatatattatagcaaatagaaattattattttgttaaattatgttgtcatgttcgtgtcattttgagtcgtaatacaactttacaattattaaattaacacttctacaatccaaaaatatttttaaagttttgaaaaaaattaaagtatttccactactaatttggtaaaatatgattatgtgatatagtgaaagcgttttacacttaataactccctcttaaatgcatccaggttttatgtagtaaatcatgaaaataacatataaatatagaggagatttacctttgaatacagagaacaacaagaatcaaaaccaatctgttaaaaattctgaaagacgcggcatgttaaaaggatgcggcggttgccttatttcttttattttattaataatcttattatcagcctgttcaatgatgtttagtaataatgacaattccactaataatcaatcatcaaaaacgcaattaactcaaaaagatgaaaataaaaatgaagataagcctgaggaaaaatcagaaacagcaacagatgaggatttacaatcaaccgaagaagtacctgcaaatgaaaatactgaaaataatcaacatgaaattgatgaaataacaacaaaagatcaatcagacgatgatattaacacaccaaacgttgcagaagataaatcacaagacgacttgaaagatgatttaaaagaaaagcaacaatcaagtaaccatcatcaatccacgcaacctaagacctcaccatcaactgaaacaaacacgcaacaatcatttgctaattgtaagcaacttagacaagtatatccgaatggtgtcactgccgatcatccagcatatcgaccacatttagatagagataaagataaacgtgcatgtgaacctgataaatattaaacaacaagcgaattgaattcaaattgtatttagctttatgcactaatcacatagtaaataatgagggagattttttaggcatgagcaatcaattcaaaagcgaagaagagcgaagacaatgggaacaattccaagctttccaaaatcaacaaaaccaacagaaccagcaatacggacaaaagaaatctaaaaaaggatggttctggggctgtggtggttgtctagtattatttattttaattatcatcggtatttcagcttgtacagctggtattacaggtaaccttggcggaaatagttctaaagaaacgaacaaaacccataaaatcggtgaaactgttaaaaatggcgaccttgaagtcactgtaaattcagtggaaactatgaaatctgtaggaccatctcttgcaccaacaaacgctaaaggtatatttgtcgttgctgatgtgacgattaaaaacaaaggtaaagaagcgttaacaattgatagttcaatgtttaagctaaaatccggtgataaaacatttgaagcagataatacaggttcaatgtctgctaatcaaagtgacaatggtagtatagaaaattcatttttcttacagcgtataaatccagatagcactgctcaaggtaaaattgttttcgatgtgtcagaaaacatagccaacgcaaaagataaaaaattagaagttatttctagtttatttagcgtcaagaagattacatttgatttatccgatgctaaaaaaacatcaaaagctaaaaaagacaagcaagatacagaagtagctgttgcgagttcaaatagcgataatgtaagttatgaagcttcggctactacacctgctacaacttctagtgcggatactgattctgaagatagcgaaaagtctagtaaagatgaggataagcagaatgcgtctaaaagtgataaatctagtgtagaaaaaagtgaatctaatgaggaaactgctcctgtagagcccatgccccatagcaaacctaccactagtgaagcaccacctagccaaaatattcacaatgaagatagcatgtacgacgcttcaacagaataaaatttcagggtagctcggctacccttcttttacggaaaaattaattatacataatcaaatcaaggagataaaaaaatgaaattcaaagctatcgttgcaatcacattatcattgtcactattaactgcctgtggtgctaatcaacataaagaaaatagtagtaaatcaaatgacactaataaaaagacgcaacaaactgacaacactacacagtcaaatacagaaaagcaaatgacaccacaagaagccgaagatatagttcgaaacgattacaaagcaagaggcgttaatgaatatcaaacattaaattataaaacaaatcttgaacgaagcaatgaacatgaatattatgttgaacatctagtccgcgatgcagttggcacaccattaaaacgttgtgctattgttaatcgacacaatggcacaattattaatatttttgatgatatgtcagaaaaagacaaagaagaatttgaagcatttaaaaagagaagccctaaatacaatccaggtatgaacaatcatgatgaaacagatggtgagtcagaagacattcaacatcatgacattgataataacaaagcaattcaaaatgacataccagatcaaaaagtcgacgataaaaatgataaaaatgctgttaataaagaagaaaaacatgataatggggcaaataattctgaagaaactaaagttaaataatggcatactttgattaatcgtaatttttaggagaaacgctatgataacatttgagaatatacaacaacttgagaaatacaccttaatgactatgcatggtctttttaatcaacttaaactcggcattatttcaatcgaaaacgcagagcatacgctttttacaccttatatgttggaaacgctctcttccctaggcgtgaaagacagcattgtcgatttaattcataaagggactgaattagaagactttgcggcatttaatttatcaattgaagacacagttacagtctgtttacaaagaactgaagaactattaaaacaatacaaaaatgtggaattcaatgacaaaatattaatcaattggcgtattatacaagagaaatagacatataaaagtcgaatgtaactacgtgagtattgattttattctttgtaaattacaagcatttcatattataaagtttgaaaagaggtatattgaaatggagaaaaatgaatatatagctaaatataatgaatatagtcaattattagacgctacatactcgcaagctgtagcataccttttaagtaaatatggcgctgtaaccgatgattattataaagaaaaatcatacacgcgatttttaaatggagaaatcaaaagtatttcaaaaggaaaatacactagagctagcgaaggattatattgccatcatataagcgaggacaaattccaaaatctatctgatctaagattcatttccaaatttaagtactcatacgacgttcaaaagaaagaaaacttagtgtactgtgatctaatcgagcatttaattttacatgcaattattacaaaagaatcccatggccaatttggtgtagctggattatgtcaaatgatcaaaccaacagtcattgattggtacattggcgaatataatccaaaaccagcatggatgcaagccaccaaagcacgtgcctatttgcctggaatattagtagagaaattactcattaaaattgacgatatgttaaaaggaatagaaatataagatttccttgagtctagataaatgattaatgtagatttattttttgctgttgagattttgttatagatgtttaaacctgtaattaaatatattttataaaatagaccacgcatacctatctataaacggacaatgtttataaatgagtttgcatggtcttgaattgtattaaatttcttttggttttaataaatcgactagattttcacaatatttatcaaatatgtattcctaaattatacagccttaatccagcagctactttcgaaacttccaacttagttgatataaggttcaatagtttgtttcgttctttttcagataaaccagaacttaaattgatattattgacttcataaaaattatagactaatgcctctatttgctttttaggcataagtaagtcgactgaaaactgatttacgtcgctttcataaatcatttcatgtaaattctttagactattatcgttactatctctcattaagtctgtatttttaaataaataacggcccaattcacgagctattgaaaatcttgtattattaatcgagtgattattattaatatagattgttcttccacttaaataacccgaagtattaccctccattttaatatatctaacatttaaattaagttgaaataatagcttgtctatgtcaatagcaaagtgttcagaagtaataaaaagttgatccattttgtcctttataaatgcctgaaataatcgaactatttttgattctaaaatatcttcataatgaactttctcaataactttcaattgattccccaccctaactaaaaaaatcgaacctacatcatttaataaatttataactataggtgtaaacattattaaaataaaacccctctactactatatgtaacgaagggacatgatttcaaaataaaataccttttttataaatttattataatatttttcattatactatacaaccgaatctaatctaacgatcctgaaaagaaaaataacggcggttccgcttcatattcatttttgtccaagtgttctttttcaattatttgattgacggttttccaattttttacttcatgctcttttaaaaaatggctatgaaaaattctatccccatagatttcttcatagccaatgctaatttgtttcatgtcatttctttaaaattcctaaaaatatataaactaaaagcataagtaacacagcaaaaattgccgaatatataattattgaaaaagcattgctttgcattggaactaaataatttaaagtacaaaataataataatgctaaaattccaactttaagtgaatattttaatctatccataaaatcacccttactgatatccccatttttctcctgtcagaacgtattccccggctgcatactttttagtttttaattttatatatattcccttactagtatcaatattcgatgcagctatagatccaaggaaaccaccaacacctgcgccaactaaacctcctgttagtgcagaaataacgctaatagcccccgcacctaaagcagctattgtttttgtatatgcagaagaaagatataatgttgcagtatctttacctgtttctacatattgagttttacccgctctcaattggtcttcagctttatatttttttatttcttcttttgtaaatatatcttccagtttataaccttttttctcaagttcatcaaataaattttggttactcaaatatattacctttgcttgagaatggtctaacttatcttcagcatgagctacatctgaattataagataatgaaattggactaacaaataatacaccagcagctaataataaagatttttaattcgtttttcattagtttcttttagatgatttttgtatttagatttcgtataaacagaaactagattttttcatgatcgacctatcttttgtccagatacagtgagacccttgtcatttaaatgatttttaattcgtcttgtaccaaagacttttctattagaattaaaaatatttatgacggcatgttctatgtttgaatcatctttagtgattttattatcttttctttttatagaatcataataggtacttcttagtattatcaggactttacacattgctgatactgaatattgatgtgcattcttttgaatgacttctatttttgccccataatcagcgctacttgctttaaaatatcgttctccatttttaaatgttgaacttctttgcgtaatttaatcagctctttttcttcatccgataagttatcttggtgattgaatgtacccgtgttttgatgttgctttatccattttcctacattttataaccgccatttacaaacgtcgaaggtgtgaaatcatactcgcgtataatttcattcctaggcttaccatttttatataatctaaccatttgtaacttaaactctgaactaaatgatcttctttctcttgtcataataaaatcgcctactttcttaaattaacaatatctattctcatagaatttgtccaattaagtgtagacgattcaatctatcagctagaatcatataacttatcagaagcaagtgactgtgcttgtatatttgccgatgatataatagtagagtcgcctatctctcaggcgtcaatttagacgcagagaggaggtgtataaggtgatgcttattttcgttcacatcatagcaccagtcatcagtggctgtgccattgcgtttttttcttattggctaagtagacgcaatacaaaataggtgacatatagccgcaccaataaaaatcccctcactaccgcaaatagtgaggggattggtgtataagtaaatacttattttcgttgtcttaattatactgctaatttttctttttgtaaaatatgcaaggttttaaagagaaacatcaagaactaaaaaaggctctatgtcaaattggactgatgcgttcaatatccgaagttaagcaactaaacattgcttaacttcctttttactttttggagcgtaaagttttgaacataataatattcgattgcgcaaatgattgtaacttccataaccaaaagatgtacgtttaattaattttattttgttatttataccttctaaaggaccatttgataaattgtaataatcaatggttacactattaaaagtgtcacaaattcttatgaatctggcataaactttgaattaactaaataagtaagaaaacctcggcactttatcattttaatagtgtcgagatttttatagatactacaaatatttataacatagttaaactcatctaatgacttatatttttgtttcatcacaatatgaacaattatttattggacgtattttgctctttttttatttcagaaactgacttaggatttttattaaattttctacccaattcatctgtataagaaatatcggtatcaaattgaaaatcatcaacagatcttataccagctgtaaatgataactttttatcattatttatataaccactaatagaataaccatccattgggttttctttaaaattagcgaagcttatatttttataacctttcacattgtacttcatataaatcgttattctttctttttgttcatcataatatttcttttcgtcatatttcatcttcaaaaagattccgcctagaatcaatattaaaattataattacaatcataagatattttttattcaaaaatcaatctccttttcattgtacttattgacgaacattttgaataaattaagcatattgagttttacgatgattgtataaacgttacaacccatatgattgttggttttaacattagtcaatttttctttcttataatcttaaatcatgatttggtttactttaacacttaaataattatatttttatccattctattcataacatttattcaattggacctgaaaagaaaaacaacggtggttccgcttcatatttgtcaatagcggtttaagattggcgtgttttaaatacttaatcactttcaaaatctttttagtcagtatgattcttctataatcttaaagattttcatattataatattacacattttttcgaaatcttatttaaacttatttactagtttccttgtggattgttggttgtgttttagaaattcacgtcacaagttcaatataaatattgtttttttactttttataaaagtttgagcggtggcataaatatatagataaatctaaaaattacgcctaatttttgacatgtcattcttaattattttcttattatatttgccatcgtcataaaaaacattgtaccaccattcttgtctatctcgaagagaaattttttctagatatattttccatccaatagacaattttttagtattaagaaagtttaataaactttcttttttaataagtaaacattcattatcaaattcgagtaatttagaattaatacatattgtttcaccaaatttagttttccatactccttcttccgtttgtattaatgaaaaataatctactatttctttacacggaatataaaaacttattgatttgtccttaacagaataatctaactcccaaaaatattcataaatagctggacataatttaccatctgattcagttaaatatccctctttataatttttataagcttcgctccaataatattcatataaatatatactatgtgctcgaggaatattaatacctctatcataattattttcataacctttgataatttcattactatcttctttattataaaaatatcccatcgctaagaaataacatgagtctctatcttcaaatggtatttctttctctctcttttcaaaattaaactttgagcttaaacatatatatctatgattgtctatatctatttctaaaaataattttgtttcatcaaaaactttggtattttttacccattcattcgattgatgcgaaggaagtggtgagggtactagtatttttgattctttatcaatttcaagtaatagtaaagtaggatcaatatctctaatataatcatcccatagtccagaatattgaacatcaggaaatttatctacaagtttagctaaaatttcatagtaagcaatccattgatattttttgctaattctttcaattgaattattaaagttatcataacgattaacccacatatcaaattcaccatgtaattttgcatcataacccatttcaaaaatcctcattaatgctatattacttaagtcttgatcacttttaaaaccctttacccagtttcgtacagcataaccaaatacatatctgccaaaatcgccatatgccccagttcctcttccatattccgttgtcattgagtttttaattttatcgatagaaaaatgtaaatggctatctaatttgttttttaaagattttatgtaatcgtctatatttaaattcgaatattcttttttataccaattacttttataaggtggcctaattttttctaaatttatattagatatatcttttgataaactaatatattcaattgtttgcctagcataatctctcattaaaatatgaggatataccatttctttatcaaatatttcttcataaatataattagcaatctctatatgtatttcacaaatgtcgattcgaagtgtcgcccctaaaacagaagcatataatctttcgactatatatggatcattgttattttcaaataattttaataaaccaataattttagttggaaatgttttgaataattttactaaagatttagtaccgagatctcttaatttattattagttgcagaaaatatccacgttaaaaaaatcatatatttttccgcagtttcttcatctaatttcttatagttactaaatagccaattaataatttcaaaaaccttttcattatttatagatatatattgagtccataaaaaatctctttttcctaaattgcattgtttcaataatttatgtaaagcccaaatatttaacggatggtttttttgaggcatttttattaataagacatctaaaaaattatttctaaatgcatcataaggaataacattatcggatatatagcatttagtatgtttacttatgctaccatcttttctccatactaaactatttataaaagaatatatcatgttataattgtttttaaactgtggaaatacttcaaatagctctatattaaattcatttgctaatttaataaaaagttcattaataagacctctattataagataaatcgtcttccttttgaaaataccttgtcactttttcatctgactgtaatttagttactaaatctcttttatcaacatttctatatttctctaaaaggtattctgataaaaagtaatctcccatacgctcatacgaaaaataaataatcatttcacctttatagccagtatttttaattaatatattttcatctattagcgcttctaaaaatctatttgacttttgaacatactctttagctatattattaacaacagtataggattcctcataatttagttgattaaattctgagtcgttcattaattcaactaatccttttattactttttgtacaacattaatatttttatcaaaatcaaatttatcttccttagataaattaatatttactgtcttaagaacatttgtaaatagctctgcaacacttatagtttggtcaaattccttaaatttatttacacagtactcacacattagttttaaaaataatggattgttgaattctggatttaatataggtaacttaggtagctctaatccataaaaatcacaaaaagatacaattggattatagttttcttccttactaaaaccttcatgctgaaatactacaatattgttatcttgtattgcgtttttgggtaatataacatcttcaaaaggggttctaatagaaaatattaaagctatattagaatacttctttatatggttgataaagctttgaaaataatttccccataaccttttaccttcaccttcattaagcgcatcaataataataaaagctcttttttttgtttctttggccttattacttattgaccttaaaaaattatcaacagaatttgtaacttctaaatcattaagtatttgatgccatggatcttcatttttagtaaaaaattgtcccaaaaacagataaataatatgattttcatctctaagttttttagatagatgcgctaaaaggtgtgattttcctatgccagcttcaccttgaactagcaaataaggataaaacaagcattctttacatgtttcttttaaatacgtttgatattttaataatactttttcgattttactcatataagtttgaagttctaatttttcattctcacttattttgtatatattacattcattatgttctgtcagaaaaatataagggtcaatattaatttcgtctatcaattcataaatttcacttaagtattttttcttttcttcaaactcttcttccagttccaaataattattgactgattgttctaaattagagaatatttttttgaaattcaaataaatattctttgcgtattttgatttcatcttatctaaaatatcattttcgatataaccttttaattcttttagatatgaaatattagtatatttaaaattattggtaatagaaataccttctataattttattattaatagtatcgacatcattattcgcagtatatcgtgaagctaaattcgatatattaaattctaatttttcattaataaattcttcttttaaatatgacaaagaatcttcaaataaaagcggagataattctttttttaataattcaatagcgtgatcttgcttatttatgtttaaattcaaaaactcttcgcataagtcttgagttaaaataatatcttttttactatcgaataatatattatgtggatttgaaaaattcttatttttaatattattattttgatttccaataaatataaactttaatcgataaccttcttccattttatttgttaaatactctttttttagagtgtcctctattttttgctttttacacgttgcggtaacttgaataataattttattcgtattatctataagatcaaatgctggtgcatttttttgttttttattatgattctcaagtgaatacccatatacaatatttaacaggtctctaaaaaaatattcggaatatatatgattatttaaaatatttatctttcctagttcttcaatcttagtattaagtctaattagtgtatcaagaaatttttcttgattcgttgatcgtttcaagttttaagtctccttttaaaatgaatatttcacttcttataactaatatttaaacaaaatgatcacataataatatttaatttacaatatgccactacagtgtcaacattttataaacactattcatttgaacatggtctaaaacgaataggacattgtaaatgattaaatagtctgtctctagttgatgtatatggtcatttgttatgcagataataattaatctaattaatttttacgttttagttacttggttgtgattgaggctttttgtatctagttgtaatattctccttttttagaatcataataggtacttcttgaaatttttagaactttgcacattgctgatactgaatattgatacgcattttgttgaaagacttcattttttgtctcaaaattagcactgcttgctttaaatcatcattttacattatcaatcgatgtttttctttgcgtaattttattaactctttttcatcacttgttaaaatgtcttgatgattgaatgactcagtattttggttttgttttatctaatttgagaaagttaatgatgttagatcatattctcgtataatttcgtttctaagcttaccattttcataaagtttaattattttaatttaaattatttactaaaagctcttcagtctcttgtcataataaaatcgcctaccctcttagtttaacaatgtctattctcatagaatttgtccaactaaatgtagacgattcactaaacttctaaaaaaataaaccccaaattataatagtctcaatattaatatattacaatttattcataggatttttatcatttcaattaataggttgttatcagggttaaataaacattttttgtaatagtccttttttacgttcttttaataactcaattctattcatttgattattcattttattgtctatagattttaacaatgcacttactttatcttgttcagtgagacaaggtattttaagatttatattgcataagttcgcatgagttaatttagctggtgcattacctgtgacaaatgctcgtagttctttaaaatttaaataataattcataaaaaacaaattatgatcattacttttaactacatgcgcatgattatttacccagtattgcccattagcaataaagctactcgtctcaaactgcccccattttgcaccatcttctcctattagtaatcgttcttcattattgaataaataatcttttacgtaatcaataattccagttgcaccatagtaagggtataaccccttttctcttaatgaagaagtaattggttttcttctattattttcaaagataaagatgtcttttatgaatttgttttcccactctggatattcttcaccattctcatctttgaatcgcaattcttgtgtgaagattttctgcatatagccttttttctgttgttgaagcaattcaagtttttgttcttctaattcaatttgtcggtcgagtttgctgaagaacttgcctattttttgctgttcttcaaatatagttggggtgaagatttttaaattagcaatttctttgaagtttagaccttctcgactacctccactttgtgcaaggaaaattttccttttaccttttcttgataatagatactgtccaaaaaaattataataatactcttttttcaatctaataatacatacatgttgatttaaattagcatgcgtttcaactatcgaattaatggctgttctacctattgatgctcctgtaatatttaaaagaacatcaccatagtacgttctactatttttcatctcatcatctatatctttactaatataaactaagtcattaagatttaatttaccatttctaatattttgactccttaaaaatggtatgcctttgtttgtatagttttcacttccacctttgggagtctttccactacctattttggtagtaagattccctaacttcttctcttcccattcgccttcaaatcctgggaatctcaactctggcacatttttcgtttgtgtattactcatctttcaacaccccaagttctttcaggtatgcattgatttcttgttcaatttctgcgatttctttgtcgatatttttcaaatcttgttggacttgatctaaatcaattggtgcttcttcttcgaatgtatcaacatatcgcggtatgtttaagttgtaatcgttatcggcgatctcttgtaatgtcgcgctgtagctatatttatcaatcgttgctttacgcttatatgtgtctataatacgttcgacttgggcatcgcttaaatggttttgattttttcctttttcaaaatcattggatgcatcgataaatagtacgttgtcgtcttgttggcgacattttttaaatactaaaatacatgttggaatacttgtcccatagaaaatattggctggtaacccaatcacggcttctaagtagttcttttcttctattaaatagcgacgaatcacaccttctgcggcaccacggaataatacaccatgtgggagtacgactgccatggtaccttcatcgtctaggtaatgtaccatgtgttgaataaaggcaaagtctgctttggattttggcgcaagcttgccgtaaccactgaatcgttcatcattttcaaattttgaatctgctgtccatttcgcactgtatggtgggttcgcaataaccgcatcaaatgtattgcctaaaaaggctggattttccaatgtgtcatcattacggatctcgaagttctcataacgcacatcatgtaataacatattcatgcgtgctaagttgtatgtagtattgttacgttcttgtccgaaataacgatacacttgcgtttctttaccaacacgtaacaacaatgaaccggaaccacatgttgggtcgtacacgtgacgtaatttatctttaccgtctgtgacaatcttcgccagtatcttagatacttgttgtggtgtatagaactcgcctgcttttttacccgctgtcgccgcaaagcgcccgattaggaattcatatgcatcacctaacatatcaatttccatgtcactgtgaacgaatggtaagtcgtcaagattaaccatgactttagagattaaagcagtacgttctttgacattgttacctagtcgcgttgaactcaaatccatatcgctgaacagcccgataaagtcattttcactttcttcacctaatgtagatgtttcaactttgcgaatcgccgtcgctagatgttctatatcgaaatcttgcgtttcaatttcacgaatcatcgcactgaataaatcttgtggctcaatgaagtaaccgacttgatcaattaattctgcttttaagtcttcacgatattcttcatctgcccatgcttcttgatacgtgatgtcttcacctgacaaggcatctgcatattcttgttcggctttttcagataagaagcgatagaaaatcaagcctaaaatgtaattacggaattcactcgcatccatgttccctcttaaatcattcgcaatcgaccataattttttatgtaattcagcttgttgctgacgttgtttttcagtaatagacatgtgattcctccgcctttgcataagtaatttatctctttgtgtaatagatttattataacatttggttatgttgcgatgttgataatttggatgttggtggtggaaattttgagttttagtggcgcaattgttattgaaaaattttatagaaatgttgtagctttcaaatgctttcaaaatcatttatattcttaatgatgtcaaaaagttgttcattcatacataaataaaaccaatcaacaattgagttggtgaaaatcaatcgttgattggctttgatgcatattaaataatgcaatatatattaataaatgttagttatagtatattttgtcaggattgggtgaatgtctaagttttaattatttatctaaattatctgcaatgaatttcttaatttcaggagagaaataaacagcaaatcctcttgtgctttcacctgatggcttattaccggcatagattacaccaatagcttcgtgtttactatttaatataggtgaaccagagctaccaggctgaataattgcatccgatgacactatattcccattcactgataatactttaccagttgattcatacatttgtagtttatttccattaggatttggataaccaatgactgatataggttcattttctttagcttctgatgctatattaaatttactagtgaaatctttgaattttctaccttttggttgtgttgatttttcttcaacttgtacaaccgcaatatcttctttaccaggataatctacaatcttagtaactttataaagtccaccaccgttattataaaaaccattaggatgtgctttgatttcatcaccgactttcatgtgataggtaacatgtttattggtaatgattgtatgatttccaactacaaatcctgttccagcgcccatccatgtaacaccactgtatggtgcaacatttgtatttgtaatttgtttaacagtattttcggctttggctgtttgttgaataccttcaaccattgttgtgccgacaccagttattgatgttaaaatcgtcaatgctgcaatacttttgatgattatatttttattcatttttctgctcctctaagtatttgtataattataatgttagctttttgaagttttattttttttaatcatttcgaataaatggaatcacagagatgatttgaattgttgagtttgttgttaatttttaaaatcatttatctatgtaaggatttatttatctgtgttatctgcaatgaatttcttaatttcaggagagaaataaacaccatatccttttgtacttttatttccagggccgtttccaccaaagtgaacacctacaacttcgtatttactgttaaatacagctgaacctgagttgcctggttctacgaaagcatcagtaataatcatgttgcctttaactgacagcacttttcctgttgactcatacatttgaaatttatttatatatggttctggatagccaacaattgaaatgcgttcattttctttagcttctgatgctatttttaaaatgcctgtgtaatctttaaaattcctgttttttggatgaacagctttatcttccacatgtagaatggcaatatcttcttgacctgaataacggacaatttttttaactttataaaatccgccattattatattcaccattgggatgcgctataatatgtgcaccaatttccatacctgcaacgacatgcttgttggtaacaattgtatttttaccgacaatgaaacctgttccagatcctatcgaaacgacaccattgtatggtgctacattagtatttttgattagtttcacattatgttcagctttagccgtttgttgaataccctcaaccactgttgtgccgacgccagtcactgatgttaaaatcgtcaatgctgcaatacttttgatgattatatttttattcatttttgtgctcctctaagtattcgtataaatataaggttaggtttttgaagttttattttttaaatcatttcgaataaatagaatcacagagatgtttaaaattgttgattttgttgttaatttctaaaaatcatttatcaatgtatggatggatgatttatttatctaaattatctgcaataaatttcttaatttcaggagagaaataaacagcaaatgaccttgtactttcacctgttggtttatcactagcatacataacaccaattgcttctcgcttactatttaatataggtgaaccagagctgccaggttggacaaccgcatcagatgtcactatatttccattcactgatagtactttaccagttgattcatacatttgtagtttatttccattaggatttggataaccaatgactgatataggttcattttctttagcttctgatgctatattaaatttgctagtgaaatctttgaattttctaccttttggttgcgttgatttttcttcaacttgtacgaccgcaatatcttctttaccaggataatctacaatcttagtaactttataaagtccaccaccgttattataaaaaccattaggatgtgctttgatttcatcaccgactttcatgtgataagtaacatgtttattggtaatgattgtatgattcccaactacaaatcctgttccagcgcccatccatgtaacaccactgtatggtgcaacattcgtgttggtaattaatttcacactattttctgctttggctgtttgttgaataccatcaaccactgttgtgccgacaccagttattgatgttaaaatcgtcaatgccgcaatacttttgatgattatatttttattcatttttgtgctcctctgtttattcatgatgcttttgatatagacgtttttttatgttatattcgaccgatgtttttcattaaaattattgaacacatgctcatggtgtatatttaaatttgtttattgttcaatgtgcttttgaataaaatctttgatttgaggcgtaaagtatacggcaccattatattcagaaccaatttttccaataccgccatacaccacacctatgacctcattgttagaatttagaactggtgatcctgaattcccgggttcaatgtatgcatcaaaatttaaaatattgtctttgattctttttatagttcctgtagattcaaactgtttaaaactattttgagcaggtaatgggtaaccaataactttaattttgtcatcaactttagcatctttcgcaaaattgaatgcttggacattttcattaaaattaaagccttttggtccacgttcgactgcttgttcttcaatattcatgacagagatgtcttcatcacccggataatcagaaatgcttttaattttatatataccaccatttcctttgtcaccgtttggatgggcagtaattctatcgccaactttataatcttttgatacatgtttattggtgataattgtattttttccaattacaaaacctgtcgcatctttaaatgaaacgacgccattatatggaaaaatatttgtatctttaacttgcgtaacattcttctctgcatttgctatttgttgtgtctcttcaacgactgcagcatttattccagttactgaggttagaatggctaatgctgccatgcttttaatgactatatttttattcattttcaagctcctttacaattcgagatatgttgcaacgctcgtttaaagtcaatttgtttatttatctatgttttctgcaatgaattttttaatttctggtgtaaagtagacgccatatgcatttctgttatcatcattttttacatcagaagcaaaatgaataccaactaattcgttgttgctgtttaatacaggtgatccagagtttccgctttcagtatgcgctgaatatacaatactgctaccttctactgacatcacagggccagttgactcatataaaacatatttatttttgtatgggtgtggataaccaatcactttaattcgctcaccagctttagcccctgccgcatatttgaatggcgttacattatcattaaaattaaagccttttggtccacgttctattgcacgctcttcaacttgaatgactgatacatcttctttacctggataattaataatctttttaatcgaataaataccaccattacctttatcactatttggatgtgcagtaatacgatcgcccactttgtaatttttcgacacatgtttatttgttaaaatagtattctttccaactacaaatccagttgcacttttaaaagcaactacaccagtatatggaaaaatattagtatctttaacttttgtgacattattttctgctttggcagtttgttgtacttcctcaaccaatgttgttccaatacctgttacagatgttaaaattgttaatgctgctaaactcttgatgactacgtttttgttcattttaagttcctctcttttaattattttgatatctagatacataattcagtatatttagttaattatgtaaccgttttcttaatcactctttaaaaaatcaacttcacgaatgaattgatgatacttatttttcaatattattttgaataaattcttttaattgtggtgtgaaataaacaccgaaattcttttcagattcatcttttccactacctgcatataaaataccaatcagttcatgtttagaattcaatacaggagatcctgaattacctggttgtgcatacgcatcaaattccataaacgttccactgatatggttaatcgttcctgtcgattcaaacattttatattttgtttgtgcaccctttggataaccaataacagaaattctatctttcacttttgctccgtctgcaaattttgtataactaacgttcttattaaaattcaaaccttctgtacttgtttcatgaacatgaactatcgcaaggtcttcttttccgggatattctacaatgtctttaacgtcgtagtttcctccgcctttacctttactcgaatgatgtgctgatactctatttttaaaaatatcattacttttagcgatatgtttgttagttacgattgtatttttaccaacaactacaccagtaccacccacaaatgctaccactgaattgtatggttccttagttgcatcggtaatttctttgacattcttttctgctttggcaattgaatgaggctgattagaaatattttcagcaaaaccaagagatgttaaaatagttaaagcagttaaacctttaaccattacatttttattcatattttacctccttccaaatttatttttatagttaatgtatctagatacacatttactatatacattttaaataaaaatattaattaaatattaattaaccacttattaacgttttattaaattattttacatgaattgactcatttatttaaatatgcttaaaactcaatatcacgcaattaaaattgactttttaggattattttggtcttaaatattaattattgaattaaaattgtaatatttattcggaaattaggtgattgaaaatatatggcggaatggtgaacaattcatgtatttataatctttcactttactatgtattgtgtttaacaacattattagcgattagttcccctattatttatgacaatatgcagtcaatcaatgaaacatgtatgtatgagtatatttggaactagtaatgtattgttaaatattgaagatgattgaattatggaatttttttcgagatatgttatttcggggatcagattttgcgattttgccttggatagagtagttgcgatttgtaaatacgtttttcaggttcgattcaatttcgttgttaagataatatggattagtttcactgacatgttgatgcatgtcttttttgttctgataaagtataaaatgtttacttaacattacttagtatgacacctgctaattcaaacattatttgagacattcttttcaaattaattataaatttttacctatagactagtttgatatttatctacatctcaaaattctcatcaacaatctttcacatccaacatttttactttagtttttataattcaaaacaacaaaactatgttaaaaaattattctattttttagttaatagatagttaatacatttttgatatttagttaattgttcttttaaaaaattattattatattttcattgtaaacgtttacaatataaaaaaaggagcaataaaaatgaatacaaaatttttaggtaaaacattagtagcaagtgctttagtattaacaacattaggaacaggcttacattcttcatacttaggattagatacaaataaagttgttaaaacggctaaagcagaagaaaaaatgacagatggtcaattatggaaaaaagttaaagattcattacatgattctgatattattttaagtaacgagtacgaaacaatcaacgttacttatttattaagcaatggatattctagcagcgtttctgctcctggaaatgatgatggaggccatctaacacaatctatagactttaaaggattaaaacaaattgatttaactaaggaaaatgtctacgatgactttaacaaaaagctagatgctaaaaatacatggaattctctaaccgagaagttaaaaggtcttggtttactacaaaatggccaaaaagtatctatttattcttcagatagctcttctccagtctcgggtaaagtgggagaaggagtaactagtggtggcgaaaatactctaactaaacgcttcatcaacaaaatcacaattgattaaaccttaaactcaaatttccttaattcataaaacattaataactaaccctttcttacaaaccacctagcccataatatattaaaacgtcatttttatttcaattagcggaaaataaaaaaaccattccgcattaactttggcaagttggaatggttaaaaaaatattttagaagccagcgtttggcttgcttagacgacatgttcgcgcatgtcgtcttatttttacatttatataataacacgcaattcaataaaatgtctaatcaataaacctcaattacattcaaattcaaaaacttttcacctaatattcatcgcttaaataaacattacgtttaattaaacagacattgtcaatcgcgtctaatacccctgctgtccgaaaacaaaattattttgtattcatatttaactgttctctttcctcccttttcaacgcaactaaatttcttttaccgttagagccccaatctttaatctttaattgttctaccgctccatttattaaatcctttaaagagtaaaactgctaatagcaacgtgataataatatagattgccaatgttaatgtaactggtatactcccttcgataaacatataaacgtaacgtgtagcatatgtgattggtaaatagaaccacgaatgatctccaagcacttctaatccaaaataaacgttaaaaataaacattaaaactccgacaacaatagccattacatctttaatgaaaatactaaaaataaaaagtagcagtaatataattacattgaaaaacaatgatacgcctataaacataagtgttattttcatatcatgtgaatgccacaataaattaattgatgctaatagaatacatatggctgtaatagtataagtaaaaatcattgatgcatttaaccaatttagcctattagcttttcctaaaatatgattaaagtgaccaatattttcttcaaaattgataacttgatagacgtttatagaaattaatagcgatgtaattgcattaaaactcgctgtaaacaaacttatttgtcgaccattccataaatttacgtttaaataccaatttataaataatataaacaatatggttacaataatgggtacaaatgtgagcgcttgcttagaaaatttcaacttacatgactttaattcgttaattatcattttaatcgccaacttttcttattatttaaaaatgttactatcgcgaaaataatgatgctaacaataatcgaaatatataaggcattgagatcattaaagtattttgaattatggtttacaactaaaccattaggtagtataccaagcgtaataagcgggattctctgcattatcccccacggcaacacccaaaataaactcttcaatgttaaaaacaagacacaaatgactgataatactaagtttattaatattgatacgaacacaccaaagtatcgagttaataaaaagttgagcggtatcaatggtagagatactacatacatcaacaatattgtcaccaataacaacatagcattaaccggatgtggattaataattaggtcacctatataagcaataataaatactaaaaagcaatgtaccaaaaatgctattgataaaatgaaaatctttgctcttatttcttttgtaatcgaccaattattacttaagtaataattaaatgatttatttctcatttcaattttaaataacgaattacaagccatacataatacaatcgggatgaaagcaattggccaaatattaaatagtaaagttatatatggtgacacactattcgctgttcccgtattacttttggcgaataagactgtgaaaatagcaaaacaaagaaataccagcggacttattaataaaacatacatactgaaagaatttttaaatttgataccttctatctttaaatgtatcatttgtaatcacctttcgttattttgaagaatatctcttctaagttttcatctttgttatttctttgctgatattttagctcaccctcatgaataataccgatatgatctgctaaaacttggatttcagataaaatgtgacttgaaataataatactagtaccttgttctgttaataattttagaagttctctaagttcttggattccatatgggtctaaaccattagatggttcgtctaatactaaaatttctggctttttaattaatgccattgcaattccaagtctttgtttcatacctaaagaaaagtccttaacctttttctttttatcgacatttaaattgactaagcttaaaacactattaatttcgctgaaatcaacgctttcatttaaacacacaattttcaaattatcttgtgcacttaaatgattatatgtcgcaggtgtttcaataagcgaaccaactttgtgcaaatcatttcgtgtcattggtctattatctaatttaatttcccctgaatcttgttgaagtatgccacatataattttcataagtgtcgttttaccggctccattaataccaagtaatccataaacttcgttattttctaaagtgatattaatatgctttaatacatcttgatttttaaaccgcttcgaaatgttttcagtaactaattttgccataatcaaaaactcctttgatttattaacttgctttttgatttgctacatttaatgctttatacacatcaagctcaccatgcccatatctactaaatggtttattattcttagatgtcccatgctgatataacaattcaatcgctttatctggatgtttttcaagatgatatttatcaatgattaaagctagtgctcccgaaactttaggtgtggctaatgaagttccagcttgataaatatatcttccgttattggcagtagttaaaatgttctccttatgcatatacccttcattcatccatttatccacaccgaattgatttaaataagcaaatgatcctccgggcgcagcaatatctgtataattcataccaaaattggaaaactcagatagattactcttttgatctgtagatcctactgtaacgacattgtccatagatgcaggaacatctttcacttcgccattaccttgatattcacgctgtaattttagtttctgtttgtcattgacatcaataccatcattaccagctgcagcaacaacgatagattttttcttcttggcgtaattgattgctttctgtaacgcatcgtattctactttttcatcttttctaaatgtttgatggtcatttttgtccaaaataatataactaccaacactaatattaatgacttgatttccatcatttgcagcttgaacaatcgcttttgatacccaaagcagttctgtttttttactaccaaacacgcgatacattgtaaatttgttattcggtgcaacacctattaacttaccattagcactcgtttgacccgacaccatcgtgccatgtcctttcctatcattgacatcgtgaacatcacctgtttcctccggttcagtacctctaaaaccgtttaaaggtactaaatttttagaatcagtcgagaaattatttttcaaatcgtcatggtttttcatcacacctgtatctatgattgctattttggtgttagcatgttttggcaaatcatcatacgatgcaccattattggttattttattcatatcccattgtcttgaaaataatgactcatttgatgttctgtctattgttttctcgctagtaatacaagttgaacatgtggcattgatatatttaatatcatttttatagtttgctaaagcattagcatgcattttcgtcattttaatctgtgccacatgtaattccggtatattatagacaacgtttaaggacttctttttaactaacttgttaaatgttgctgtatttttgtattcaacactgtaatatagttcttctgacgctgatgcattactcattgtaatagatattaaaagactcaatattattaaactaataatagcgcgctttatgattttcatattctaatctcaaatgaattccagaactttatatggttcaggtgcgacaacattctttttaaatgtttttgacgctaattcataactttctgaaatatttgctggatatattgatacaccataatcttttaataatcgaatattattttgagtaactggattttcccacattcgtaaattcatatttggaaatatagaaagtttttcaaaagctgtatgacaaatagttaataataaattgtcacatataccatttgcaattttattaatcgtattagaagtcgcaggtaaaataataatcttgtcatgtttatttgctatatctacatgatttaaaaaagggtcttcaaattcgtcataatagttatcgcaaaattgctttaatatttcaccattaataaactttctaccgtttgttgacgcgattacatttacttcatcaaattttgattttaattcaataatatagtggctaatattgatactattaactgagccacacaaacaaatcaatacattttctcccatgatatacgcctccattcagctaattaaaaacgcattggtccaatttttttcattgagaatttttgtatttttcagtgtcatcaatgttagatagacccctaattcaccttctaaaaggccaactttcctacttttaaatacatcttgcttattttcattaatgtctataaaattcaccagataatcttccttataatgagaaatcagtttatttattaatacagtgatataatcagacacttcatttaattcaaaattcaaattcataattgttaacattaatatttgtgatgacaatccatgacaaatagttggacttattaaattttcatctttatcatttactacttgtagcatcacttttttagacattttaattatttcatcatcttgtaatgcttggccgattaaaaacaacgtcgtcattacacccgtattgccataacaccaaccattccgaataaaattgaaatgattacgttcagaaattaaatcgtaacgctgcaaccatctttcgtggttacaaaatttttcgtccatgataaatttgtacatgtcttttaatatgtgctgatgattttcaatcgtaattcctttaatcacgcataatgcaaataaagacatcggtcctagcactccatgtgcaaggccaagattgatattaccttcagtaaaataatttttatcagactctaaaaattgactttcttgtgggactacccagctatttttagaatattgaatatctttaaagtatactaatatgctttttaatgctttaacattaaattcattctcatctactctatttagcaaatatctccctatcccagctaatccactgacagtatcataatttaatggatttaatggttcttgtaatatttgatcaaatttattttctatttcatttacaatgtgaccatcaatattatttaaaatattttgataatttttgccattttgcgatgctaaatccattgaaaatgcaatacctgaaagtccaccaaacaaagaattgttatattgaccactctgtaaatatggtgctaatttcatgatgtacttatgcacaatttgctcagtattaatatcgaaaactttttgataagcatctaaaaacaaaatgatacctggtataccatgtgataaagttgaaggttcaaaataatcggtttcagtagatgcttttgaaatgaaatcatctacttctgaaatctcttgaaacttcttcttcaatattagattcatatcaatcatttttgtcaccacaccaatgcttttgagttttaacaatttcttttacaatagataaaacaaatgtttcttgatccttatcaatgccaaatattcgattgcagcgcatatgaattaagctgccaataatccttgaccttttagtagttaaagtttttttaagcccttcatttaatttgctcaaaatttggttgccatcttttaaaattcgataaataccactatagtgtttagccatatattcaaaattattagcaggattacatatagttacaagttcatttttaaaaggtctaatatctttacttttaaatgatgtaggtacatagttattaacaatttccatacgctcttcattagaaattgaaaacatctcaaataaatacattattgaaatagcaacaatatatggtcgatcaaacttaaaatcattttcaataatattgacagctaaattcgtgtcatattcaaagaaggcttctatttcattaatcgtgttctttccaccatatctaaaaaattctggctcgtatgatacaaattcataatctgaaacttctgtcgtttgtcgaacatgtggtaaccaattcttcaagatgctgtatatttctgcgtaattttcgtcattcctgaataacctcaactttaaaatgtcaccttgtttgatataacgcattaaaaaatattgatctatatctcccttatctttaagatgttttacaaatggatacaaattgtcgatgataaatgtatcttgcgatggcttatcgatatgaatatgtaatgcaaaccagtctttgtcatattcaatatctgtatttttatattttggaatttcgatttcgggtcctcgataagatgattttttataaattggtgtaacaatttcatacacatgatcattctttgattgaggtaaaaatgattctactaaacgtacacgtttatgcttcttatattctttcatcaataaatatctatgattagctaatgataaatttagtagaagcttgttatctccataaactaaattcacgatattaggtatattgaattgttcttgatatttcaaaaattgttgatcccattcttcatttttaggtaaaggtaataccatctcgttaattttccaatatgctggtttaagaatgacatttttatatctgattcgtggtgaataactaaatgaatcaatactcacatcattcataggttcaatgcatttcacagattccattgaaatttctcgtaacaatcgatataaattacattcttttaaaaagttatacatattgtttgattcaaatagtacccttttatttagttggctagaatataaatataatttgttaaaggtagcaccaacataaatatcatctaaggtaagctcatactttgaataactattactacttcctaaattcaatgaatattcgtatgagtcatgattagttaatacattatgatttctcggatatttcggtatgttatttatagaaatcatttctacattgtcatcacatatcatcttctgataataatgtcctttttcatgttctaattttgctaaagtttcagtatcaattaaatgatgaaatcgcccaaatgtagcgccagcattaaaagacgccgttaaaggactaataacaatgagctcattgtactgattgtaaaaacgtcctaaataaagttcagcataaacatctgcactcattggcgcatgataatgattgatttcattatcgttaatcaatgactctacatctttttcatttatgactatctcatcgttatttctcaaggcatgtaaaaatttttgcttaagcattacaatattatttccatcggtttcttcttcttgaaaaattgttgtcccgaaacctgttatatctgaaatcaaatctttaatattcacgagttgttcaaatccatacttttcaataaaacggttgtgaagaactttcaaatctgtgaatccaatattatttcttgataaaagccacaataagtacgctgcttcagatatatttgttgctatatcttgatgtaaataattgttaatcatgtcaattttggtatcaatttgaagatagtttttacatttgaatagtgccttcatatgatgaataatgtctttatataattcctcgccaaatccaatttcagttttttcataagctaatatcaatttctggatttctctaatttttttcacaaaatcatcattatgtaaagaaagtttatttaaaatataatttaaattatcgctatatgataacggtggtctgattgttgaatatataatttcctttgagacaagattatggatatatactttcactttagtaatatcattaatttcaaattcttgatttatcttttcagctaaatttgaaaaagtaatattattattcgtcacagtggttttgatgaatacgagtaattcgctatttttaatggaaaaagatgtatctttattgttgtttaaataaatagcactttgttcatttaaatatattcgatcattgataatatgtgctttactattccaaataactttcaaattttgataatattcatcaatactctcaatataactaaccagtttatacaaccattcgccatcgactttcacatatttttgaatactatttccaactttaagacgtgttggttcatttacaaaatgccccaaattaataccacttaataatccaaatggagttggacgtgttgacattctaattaaatattttaataaactttctttagcatctctaaccttcttgttatcgccatcaaaatttatttcttgtaaagtacaatataagttaaatgttgttgttaggattgattctttcatctgagcatttaattgtaagtcgctatatttaatttgttcagtatttaaaaataaattgaaaaattcaactgataataaaggtgttctaatcatacaaatacttgacggttcgtaaatagtgttcatttgtaagcacctcacatatttgaatagacaaatagagccctttcaggctctatttgctgtaatcttaacagcagaagctattaaaactaccagtcttagcacaaccaggagtacataaactatgacttgtaatacgttcgtcacctgctgaatcatttgagttattgtttgctttaacttgcacgtctaaatcaagaactttttccatagataaaacctcctattattagttgaagttaaggcctacttcaattgtcatattatcccttttcacacaacaaatcaataaattatataattatattttgtgaattttttgtaaacacttattaatttagtaatactattttgataattagatttttgtgtttttttattactatttattttcactaataattttgcatctaagttcataattttaaatttattgatgaattttttaatagattaatcaattcatttatacaaatacttagatatttttatctatcaatactattacgaatttggagatggctgcttgagattaattaatagatatttatgcagttttgttctatttatacaaaatttagcaaataataattgaagttattttaaagatgaggatataaacatataatttcaatgacttgattattttcttaaatgacatgttctaagagggtcaatataataaccaaagcttgtcattacttatatgtaaagatagaggctaattacataatcctaacttatttaacaggaagtcatgaaaactatattacaactaaaagtataactttccatcaccaaagtcagaatttattgaaacactcaactgataatatagaaggctaattataaaaatacctggcgattaataaactgtttccgttttttagcacttaatatatttaaaaagacaaatagagccctttcaggctctatttgctgtatccttaacaacagaagctgttaaaactacccgtcttttcacaaccaaagctacaaaaaagatggctagttattctttcgtcacccgctgaatcattagtgttgttatttcctttaacttgcacgtctaaatcaagaactttttccaaagataaaaccccctatttaaaagttgaagttaagacccacttcaattgtcatattaatcattaccacacaataaatcaatgaatttaataataattatttgttattaatttgtaaatcgtcattaattttatggtactattgttagtttaaacaaataatgtaacttctttttttaatatgttgtgaatattttttgtttaactcttaaatttcgggtttaacttcctctatttctaacagttatactccaggattagtttctttagaatccgtaccgattaatttaacagtatggttttgccagtcaacttcataagtagatgtaaacgttactgtattttgatttttgtagttatttccaacccagtgtagtcgattccattgattagtatatctatccatttctctttggtaagttactttgattttagatttttttgtatcattttgtttatgagaaagtacgcttataaattctgggttaaagttaccacgcgccaataaaggcatttgatgtgttggcaagaaattttgaccagcatttgaactactttgtctaccacctaaaaacagttcattaccatatgttgggtcataactatctctaccatatggtccccaaccattattcataattttgtgcgcctcaacaccccagccaattgatttatgatttgtttttctatcaatcgtagttctgtaactttcttgtttataatttatcgtttctgaaaatgattttgatccatttaatccacctgataagccattagatatattaatatctccgccataagaataacctaatgtttgttgaacttggaattcttcattttgatttttaggtgcatagtcaacaacatttacagcatcatttgattctgaactaaccgaaacattatacttaccgccccaataaaactgtgagtaattgtaatcttttggattaggctttttataacctgaattaatgtttccggctgccttaagtactaacgtatctttgtcataacttttatccttaatgaaattaaacgttaaaatttgagaaatattcaatttatcattatcagatgttgctgttgttttgtataaagtgattttgtcatctacttttttctcgcttacaggtgtgatatgttgagctgcatcaactgtattcgatagcaaaagcagtgcaattgatgaagcaactgatgatttgactaattttttcattttcatattaattatgtcctttcactttaatttcgtgtgttttccaattaacttcatatctaactacaaagtttctatttacaaatgcattatgctttctttctgcgtaaataccagttctagggaataaagtcgcatatgtaatatctaagtttctaccatatgaaatttcaaattcactcgtatcacttgaacctttttcatgtgatagtgtagtgataaacgatggattaaagccactttgaactaaaggtggcaattgattatcaggagcaaaatattctcttgctgaacctgttggaccatttggactttgtacgaataaatatctatcatgcgcagatttttttccatcaggcgtaacaaattcgtttgctttaacaccccatttaacagattttgagttttgcttgtctacttcactgacataactcttttgggtataactaattgttttagaataattaaatgagccattgccacctatagatggtgctgactggaaattacctccaatgttatatcctaatgtttgaccaacatcagtagtttctattttgtttttaggaaggtaattgattaagctaacatttggatctttagtcgtcagtcctatattatattggaatggccaaatcattcgtttagttaattcatatccactacccttcacatctgaaaatgaagttctggaattaataaaaccttgcattttaacaattaaagcgtctttgttatattttttatcttttacaaagtcgaattggacattttgagtaacgccccatttcttactacttacatcctccgtacgtttgattacttcagcaccatcaccaatattttcaatattagtatttgctctagattcttgaatcggagatgctaaaggtgcaatcagtcctactgacaaagttgcagctaacattttttcttaaacataagtttcactttctttctatataaatttttaatacaaatttattctagattatttcacttatttataaaattaactgttcattaaaaaataaaatgctataaaatattaaaaatgacacaatttattcatttatgctgctgaaaaccggtcattttggcgcaaccttcattacctttaaatagttccctttatattcgaacaatatgataaaattaccgatactcaatcttttctctgtaaaaataaaaacgaactttaatcaaatcttcaaaaataatgtttgtattatcacaaataatctataattgaatttaaaattaactgattattaactattgtccgttaaacgaagatgattacttcgtatactgttataactgaaatgttctatatatcatttcgtaatatcgcttacttcatctaaaaaaatttaatgctatgatttagtctaattaaaaacatatatatatttactatgaactaaaatttcactttaaaaataaaaaaccatgatttcgaagtcttcataaactgaagcttctactctcatggcaatttatactatgatattcaattataatgcctagtctcatagtaaacggctactacattcgcatgtacttcgttttactgtccacgcatggtcgttgacttatttatattataatataaatattttatttttcaatacttaattttaaaaatcccctatgaaaatgttgatgagctacatctttaaatcttattatacattgtataaaattatattgcgaggtagtaaattgatattatacacttttggttgtgtatgcatctcacctatcttttttgcttttttcaaataagaaagtattaaaaattaatgcctatacaggaacagacatggctaaacttgatttaaatagtcttgacgacgagcacgtaaaattattaataaatgaattaaaatatccagaaactcatatcgatgtaaatgaattaaaaacaatagttgctagtcgaataaatgaaaggcaagaaataataagttttaagttaggaataaagtacttattaacaataaaaagagggaacatagaaaaagataggttttcaatttcaatcattttcaaagatacctatcacaccctagttagaatagatattaacggtggtactcacgataatccagatggaacaatcgctccgaaaagtcatattcacatatataatgataagtatgataaaaaggataggtttgcttatgaaattaacttgaaagatttccccgacatctataacttgtataatgtgtatatgtcgtttttagagtataataatataaaagaccttgaataaaggagggataatatgactacatttgatgctaaaaaattaaaaaaagaatatcttgattggtataatcagaccttagagttttctaatttatcaaacaatgtagtaagaatagatactccttttaaagataattctttagataatttaataatttacgctttatacgatcagtccagagacatgattacactgacagatgacggctatactatatttgatttagaaaataatggtatttctttaaataaatcaaaaaaacgtaaaaagatttttgaagagcacctttcagcttacggtattaaatataacgataaaactcacgaaatttttgttcaaactaactttaaaaattttaataaatcgaaacataatttattacagtgccttatatttgttaatgatatgtacttactttctaatcctaagtcacagaacatatttacagaagatgttgcaaacaaattggatgaacataacatttattacggaagagatttacctattataggaagcagtggtgttgttcataatttcgacttttttattagcgctaagaaaaatcaaaaagaaaaatttatcaatgctatttctaaccctaataattctatgattattaagtcgaaaataacggatgctatgcaagcaaaaaaaataaaaagacacaggcaaaatgagtttatttttattttaaatgactcaaaaaaagaaataaatgaacataataaaaatcttcttcatgaaaactatattagtacaatagattatagcgaattagatgaaaagataggtttattgatttaatatatatagacgtgataatatcaatgtttatattaaatgaaacgaatttgaaaatttcgaaacagcttaagatagcaaattgaatagccttattgataatgcagaatcgtctacacttagttgaacaaattctatgagaatagatattgttaaactatttgggtaggcgattttattttgacaagagtcagaagattatttagttcatagtttaagttacaaatggctaaactttatgaaaatggtatgactagaatcgaaattatactcgaatacgatttaacactctcaatcttctcgaactgaataaatactgggtcattcaatcatcaagacaacttaataagtgatgataaatgttcataccattttgcaaatataaccagatactctcaacaaaatgtagagttcaaaattaaaaatgtccctaattggcacattgctgtatgataataaattcaacttagatttcaacaatataactaatgatgcttatatttaccgcgatatcaaaccaaacagcccatccacaaacaaattagaatatatcatgttaataatagtaaatgatatatcttccaaagaccgcaaactgtagcagaacatgagaaccttgcgcttttgaaatggtctaataaatcaaatatcattgaaactttaatcacataaattaacagtagtcacctgttcgcagttctataaattacaaatgcaataaaggctaaagtaaactaattactttagcctttattaataatttagtcgaatttattaaaaatcgactaactcctggttatgctacgctttactttataatccgcacgtagatgccgattgattatattataatattattattttattttttcaagcgtatatataatatttgattttctttaagtaacagctaaacattacatttcaaaacgattaggtcatgcagatgtacatacaacgcttaaaacatattcacatttgattaaagaatttgaagataatgaaactaaatttatagaaaaaaatctgaatgatttgttttgtgactaaacttcaaaatcttgtgactaaaattaggattattcatcaaaaattagtcacattgtggctaaaaaattttaaatggatataaataaataagaagtgtaaaaatgaggataatagctcaaatgcagatatatcaagggattgagtccaaaataaaaatagcgcttaaaatgggtaaaaccaatttaagcgcctttacggaaggtaagggattcgaacccttgagacgcttgtgacgcctacacactttccaggcgtgctccttcggccagctcggacaaccttcctcaacaataaatatgtaataaaaaaacagaagcgatatttcacttctgcttgtatgactcctacgggactcgaacccgtgttaccgccgtgaaagggcggtgtcttaaccgcttgaccaaggagccatggctccacaggtaggactcgaacctacgaccgatcggttaacagccgatagctctaccactgagctactgtggaataatagaaaataatggagcgggtgatgggaatcgaacccacaacatcagcttggaaggctgaggttttgccattaaactacacccgctaatgtaaacgattatggggcggctgaaggggatcgaaccctcgaatgtcggaaccacaatccgatgtgttaaccacttcaccacaaccgccatgaattaagaatggttcaggacagagtcgaactgccgacacatggagcttcaatccattgctctaccaactgagctactgaaccgtaatggtaataataatggcggtctcgacgggaatcgaacccgcgatctcctgcgtgacaggcaggcgtgttaaccgctacactacgagacctattaaattaaaaactatgtattgcgggaggcggatttgaaccaccgaccttcgggttatgagcccgacgagctaccgaactgctccatcccgcgctaatattattttgaattacctaattaatataccataatcaaaaatctaaagtcaagaactttttgaatttaatttaaatgttatctcttaaataattacttaaatatcgtagcaacatgttctctgttgaacacaaatattagtatattcatttttgtagtgtacgtcaacgacattttcaaagttttttgtgtaaaaaaacgcttcttattcccttttatcatataagtgtctaatagttgtcataaatagtgttaaagcatttaaaaaggtataggagttataaagtttacaacgcctataccttctgaaaaagaaattataaaagcttgttacaccgcatattctttcagtcagcgactaccaatataacattgtagccctaagacattgcttgacgcctcaattacaacaatttttcaaaatcagcagctacctactgacacaacataacacaacccatacactaactatcgtgtcatgtaatcttgcatccgatcttgcaacgctgtaaatgtttcgaagccatcctcttctaagaagtgccctccatcttccacgatttgcaagttcccctctaatgcattcattaaacgctgggtctctttatatgaaacgtatttgtcatttttagaactcaatccgtaaaaattgtcaactttctttttaatattatcgtaatcaatggttacattacttaaatcaatatctaaatctatattttctgcatcttctttaaagcccgctatactgaaaaagccttcaatcggctgatcaatcatttcaatatattttaaagctgtgattgaacctaaaccatgtgttacaaaatatgtatcctttttgcgtacattaatttgtttcgtcatagcttcaatccactgatccactgtcttcgcttcaggggattcaaaattaaataatgttacgtcatatccttctaaagttaagttatgctccaaccactgataccaatgatttctactatttccatgcatagaatgtacaataattacatctgtcatctcattctctcctttcaacttactacttcttttctatttttaaaaaaatgactgattacctataattgtaaaataaaaacaccttaattagaaatgttatatcgcaaagtgacatttctaattaaagtgtattgtcatcatttcaatatcattcaaaaacagctaaacctttgtctctgcttcaatttcacaaaaataattcccgctgaaagtatctatatttacacattacttccaccattatataacttaaaaatgactatatttcatcaaacattatctaaaggcgtcgcacctacaccaacaccatccaacaattaacttacaactctgcgattacttcttcagcagcaactttaccttgcgtaatacaatcaggtagtccaaccgcttcaaaagatgcaccagttactctaagtcgtggatatgtttgtttaatatgtgcttgaatctgtctaatttgttgaatatgaccgacatggtactgtggcatacttttcggcaaacgattgacaattgtaaattcaggatcacctttaaatgtcatcatttgacttaaatctctacgtacaatcgatactaattcattatctgtatgatcatcaaccacagtatcacctggtttacctacatacgcacgaatcaaaaccttaccttccggtgtagtaaatggccattttttcgatgtccaagtacatgcggtaatgtctgtatcactcgttctcgcaattacgaagccagtaccatcatgggtattttcaatgtctttttcatcaaatgccaatacaacagttgcaacagtcgtactatccatcgttttaaagtaatcaaatgctggatcttgtccgaaccaatttaaaaacacttgatgtggtgtcgttactaatacgccatcatacacttcttctagttgatcattgtaaacaattttatattgtttttgagatgtaattatatcatccactgacgtattgtagcgtattgtcacacctttatttttaacatcttgttctaatgcttcaataaatgagcttaaaccatgcttaaattgtttgaattgtcctttcggtgcgccaggatataattgtctttgtttcagacgcttatttttctcatccttcataccttttatcagacttccgaatgcctcttctttttctttaaaattaggaaacgtactcatcaaacttaatttatcaatatcggtaccataaataccacccattaaaggctctattaaattctcaagtacctcattacctaatcttgctctgaaaaatgcaccaacagaaatgtcaccatcctgcatttgagtaggtttttttaataaatcaaaccctgctcttaatttaccaagtggcgatattaattttgtagtaacaaatggtttaatatctgttggaatacccataattgaaccacctggaatcggatataatttatttttcgcaaaaatatatgattgtccagtcgtatttgtaacaatatcttgttctaatccaatatctttcgctaattctgtcataatcgtttttctacctaaataagattcaggccctagttcaatcatataaccatctttacgatacgattgaatctttccccccggacgattcgatgcttcaaagatggttacatcaatattaggatcttgctgttttaaaaaatatgcacttgataaacctgttatccccgctcctataatagccactgatttagtcacaacgtttcacgcttctttcgtcattaaaatatagacttgatttcatcaataattgcaccgataaataatggatgtgtattcggcatttttggacgataataattcgcaccaatatcatcgcaaactactttacattcataatcattgtcataaagcacctctaaatgctcacatacaaaacctactggcgtatatataaagtttttatactgatgtttttcatataaatcacgtgttaaatcttgtacatctggccctaaccaaggtgtacctgtattaccttcagattgccaaccaatcgcgatatgttcaatattagattgttctttaattaaaagcgcagtatgttctagttcttgtggatatggatcattattcttttcgattaaaccttttggcaaactatgtgccgaaacaactaataccgtgtctttatgttcctcttccggtatttgagctaatgtttcgttgactttattcgtccaatattcaataaatttaggttgttcataataatgtttcacatgtgtaagttgaataccatattttgcagcttcttcatcagcacgtttgtcatatgatcctactgaaaatgaagaataatgtggtgctagtactaccgtgattgcttcagtaatgccatcattgtgcatttgttcaaccgcatcttcgataaatggtgaaatgtgttttaatcctaagtatagtttaaattcaacatctgcatatgctttatttaatgctgaaactagcgcatcagcctggtcatctgttgtacctgctaatggtgataaaccacctataaattcatatctatctttcaaatcttgaagttcttcttcagatggacgtttaccatgtctaatatctgtataatatggctctatgtcactttctttataaggtgtgccataagccataactaataatcccatttttttagtcattgataataccttcctttaaatgaattatctttcatgtgcttcaatgtaaaactatgattatctttgtgtatatgtgtgtacgaattcgcttactttacgtaacgtctctggttgcacttctgggaatacaccgtgtcctaaattaaagatgtgtttaccgttctccataccttgatctaatattggtttcaatctctcttcaatgacattccatggtgctaataaaattgatggatctaaattcccttgtaatgttttagtaacgcctaattgttgagcctgattaatagacgttctccaatctaggcctaatacatcaatcggtaaatcattccattcattgattaaatgactggcacctacaccgaataaaattaccggcacatcatgtttttctttaacctcactgattaatcgaatcatatgtggtttaatgtaacgtctgtaatcctcgacatttaatgcacctacccatgaatcgaaaatttgaatcaattcggcacctgcttcgacttgagctgttacatatttaacagatacatcaactaaatgattcattaaagcaaaccatgttgcttcatctctatacatcatcgcttttgtaaaattgtaatttttcgatggtccgccttcaatcatatatgacgctaatgtaaatggtgccccagtaaatcctattagcggcacatttaacttttcttctgttaaaagtttaattgtatctaatacatatggtacatctcgttcggggtctatttgagaaagtttctcaacatcttgaattgttttgattggattatgaatcactggaccaatacccgatttaatttctacatcgacaccaattggctttaatggtgtcataatatctttgtataaaattgctgcatctgtatgataattatcaactggtaaatgtgttacataagcgcacaactccggctgatgtgtaatatcgaatagtgaatatttttctttcaattttcgatattctggttgcgaacggccagcttgtcgcataaaccaaacaggtgtatgtgatgtttcttcacctttgatcatttttaaaattgtattgtttttattatgcaccataaaggcctcctaaattaaaatcattcttatctatattatcatatcgctcattcgttcgtattttcaataaataaatgtcataaaactgacatttaatcatagaactatttattgtaaatttaaattctaaagtccattattttgtatcattacttctaaatatctcgcaagattcattatagtaattttaatcaattattaatagtggtaatgactagtttatcatcgtataataaataaaaacataagggggacctttcatatgaagaaactatatacatcttatggcacttatggatttttacatcagataaaaatcaataacccgacccatcaactattccaattttcagcatcagatacttcagttatttttgaagaaactgatggtgagactgttttaaaatcaccttcaatatatgaagttattaaagaaattggtgaattcagtgaacatcatttctattgtgcaatcttcattccatcaacagaagatcatgcatatcaacttgaaaagaaactgattagtgtagacgataatttcagaaactttggtggctttaaaagctatcgtttgttaagacctgctaaaggtacaacatacaaaatttatttcggatttgctgatcgacatgcatacgaagactttaagcaatctgatgcctttaatgaccatttttcaaaagacgcattaagtcattactttggttcaagcggacaacattcaagttattttgaaagatatctatacccaataaaagaatagattcgaagaaaacttccattggttatgctgttaacgtatagatgctaatgtaatctgaacgccgtatcatttggcgttcaacattacatgcacctttacaacatacatgccaatggaagttttttagtctcgtaataatgtttcctgatatttcaactttttaataatacttctaatcgttaataaacctacaatatagaaaatgagtacaacatagaataacgtcatatgttttataataaatgtcactgcaaacacagtacaaataacaaacattaatctatataaaaactgttcataccctttgattaccttctcttcaggtacaggccacacttgaggccataagccatatgcttgctgtgaataaaattgtgccatttgtaacaatataatatatacaaataaacacccaataattgctgtcactaatggatatgataaccaaaccattaataaaactgcaataattactaacctaaagataatattaaatgcgtctctccctcttataaagcttctaataaataagaataaatacatcgcattagagttaaatttactaccctttggaactggtaaaagtatatctagataacttcttctgactgcagattctttcaaatgttttacatcggtgaacatattaacaaatttataataattcatatgatgtcgatgttcgattgcaatcattttctcccaaggatacaaaaagcctggtttatattttttaactaaaaattctattaacacaggcaaagcaaccatcacaaatgcgatgtaccattttggagctaatagtaagtaatatgttagagcaaaggtgatgaatgatattaaattaacttgccatgttttaagtcccgattgataccattgccatcttaagcgtaaaccaacatatggaaaaattaatgcactgactccaaaacaaatataaaatgccacattatgttgattaatattgtaaaacaacgggaacattacaataacaataatgagttggattaatatgcgcgcaaagtaactatataaaatcgcatgacgcataaattgagacatgtgtttttcaaatggtaataaaaagattttatccgcttcttttaacagtggtcgcattggaaaaatagatgtcaacgcaacaatcactgctgctattaatgaaaaattgatattcgttggaatatgttttaaccattcaccatatccaaaaataaatgcacccagcaaaataagtaaaaagaccatgaaatgaccattaaatataaacttattataataatttttctctttacgaagggcatgtaatcttttattaaataatgtggtagcttggttacgcatgtacatctccaccttgcgtcacatgaatatatatatcgtctaatgtttgattatgtaagccagtttgttgtctcaatgcttctaaatctccaaatgcaacgacttcaccttcgtctagtatgataaaacgatcacagtaacgttcagctgttgctaaaatatgtgtactcattagaacggttctaccttcgtttttcttttcaaccattaaatctaacatggattgaattcctaatggatctaggccaaggaatggttcgtctataatatacaattcgggattaacgataaacgcacaaataatcatgactttttgtttcatccccttagaaaaatgactcggaaaaactttcaactcattttctaaacggaatgtctttaataatggcattgctcgattcatcgtttcatcacgatcaatatcatatgccattgctgtcatctcaatgtgttcctctaatgtgagttcttcataaataaccggtgattccggaatataagataactttcttctataagcctctatgtcatcattaatgttgatatctgaaattgatagagatccttccataggtgtaagcaatcctagcatatgtttaatcgttgtactcttaccagcgccattaaggccaataagtccaacaatttcgcctttgtttaattcaaaatttatatctttaattacagggcgttttccatatccacctgtaagctgttctactttaactgtcataaggcacctccatgacttatattgtaccaaaaattataaaatgctcatattaaatacacatgtcctaatatcgaatttttagcgacaatgttataatgaatggtaatactagttgaaaaggagtgtagtcatcatgtcagaaacaattttcggcaaaattttaactggagaaattcctagctttaaagtatatgaagacgattatgtctatgcctttttagatatatcacaagttactaaaggacatacgttattaattcctaaaaaagcttctgctaatatctttgaaactgatgaagaaacaatgaaacatatcggtgcagcattacctaaagtagcaaatgctattaagcgtgcatttaatcctgatggtttaaacattattcaaaataatggtgagtttgcagatcaatctgtatttcatattcatttccacttaattcctcgatacgaaaatgatattgatggatttggttataagtgggaaacacatgaagacattttagataacgatgcaaaacaacaaattgctgaacaaattcaagcacaattttaaatgtatgcttaatctaagctcgaacgggtataatatgattaatattataacaattgcgtttgaagtgataacatcaaggttagcaattttaaacaaaatgagttatcaagataacagatgttaaaagtgaggagaatataaatgaaagcatcacgcattctattcggtatcggtgttggcgtagcagctggttttgtagttgcacttcaaggacgtgacgacaaaagtgtcaagaacaacacgatcgatcgtactgcccctactggttcaaaatcagaactacaacgtgaatttgaaacgattaaacaaagttttaatgacattttaaactatggtgttcaaattaaaaacgaaagtgcggaatttggtagttcaattggtggtgaaattaagtcattacttggaaacttcaaatctgacattaatcctaatattgaacgtttacagtcacacatcgaaaatttacaaaatcgtggcgaggatattggaaacgaaatttctaagtagcaggttacgttctcgatcacaactatttttattagtaacagcatatttattttttaaaattaaatgccaaataaacgagatgacattagaaattagatatttcttgtcatctcttttttaaaactcaaatgaacttatgtttacaaattataggaagacattgtttgtagtgattttcgcttaaatcatatttatgaattgattgaaaacattgcttaggattcattgtgttatccttgcactttgattacgctttacttaaatcattatcgacaaacaacatacttatattttcattgagccgaaccttatatacacattacatataccttacttgcacaaattattaatctggtgtttattataattacatatcactatatttttagcatttgtataacttagttggtcaaaagatgcttttgcatatgccctgccatatccattttttatattattcaagttttcaaatactcatgtcacacgcgcctttttcataagtgatgctttattagcaagaatatgtgttcgcagaaatttgttctgcattctacttctacgctagtcaatcagacaattttaccaatccccactttcgcgtttcaaatcaaacaatacgtcgctcctttcttcttatataacaattcttctaacatgatatgttactattgaattactgaacctgagttagttataatctaacttatattgaaaagagatgaggcgtaagatatgtttttatgtaaaagacaaattgatatcaatgcacgatttggtttgcctagaattgcatttatgagtgcagttgcaaccatcattatgtttttagttagttatgaagtaatgtattttttatctaatacgccattatcagatagacattttctcatctttttattacttgtatttatgacgtatccattacataaaagtatacatttattatttttcttaccatatagaaaatcgtttaaagttcataagttaactaaaagaaaatggcttatattctataatacctacgtcaatcaacctgtacacaaattttatttttgcattaacttaatattgccgttaattatcttatctgcaatgttcgtttatctaacaatttcattcccgcaatatggacattattttatgttcttattggcattgaatttcggtatttccattacagatttattatatttaaaaataattatattttctaattatggacaatatatagaagaacatagtacaggtattaatattttgaaaaaaattaaaaatccatatcatttataacaaaataattatagcaaggtgttattatttgtttttaggctatgtaatagcttacaatcaaatgtatatagaccttgtttttttattttcatcaatttctacccctaaacctaatgctctagtctgatgtcatgggttattgattggtgataatataaaactatgttatattcacgatgattaacttacaaaggagtttcaactatgaagatgataaacaaattaatcgttccggtaacagctagtgctttattattaggcgcttgtggcgctagtgccacagactctaaagaaaatacattaatttcttctaaagctggagacgtaacagttgcagatacaatgaaaaaaaatcggtaaagatcaaattgcaaatgcatcatttactgaaatgttaaataaaattttagctgataaatataaaaataaagttaatgataagaagattgacgaacaaattgaaaaaatgcaaaagcaatacggcggtaaagataaatttgaaaaggcccttcaacagcaaggtttaacagccgataaatataaagaaaatttacgtactgctgcttatcataaagaattactatcagataaaattaaaatctctgattctgaaattaaagaagacagcaagaaagcttcacacattttaattaaagttaaatctaagaaaagcgacaaagaaggcttagatgataaagaagcgaaacaaaaagctgaagaaattcaaaaagaagtttcaaaagatccaagtaaatttggtgaaatcgctaaaaaagaatcaatggatactggttcagctaaaaaagatggcgaattaggttatgttcttaaaggacaaactgataaagattttgaaaaagcactatttaagcttaaagatggtgaagtatcagaggttgttaaatcaagctttggatatcatattattaaagctgataaaccaacagactttaacagtgaaaaacaaagcctgaaagaaaaattagtcgatcagaaagtacaaaaaatccaaaattattgactgatgcatacaaagatctattaaaagaatacgatgttgactttaaagatcgtgatattaaatcagttgtcgaagataaaatcttaaaccctgaaaaacttaaacaaggtggcgcacaaggcggacaatccggcatgagccaataacacaaaaccgagcgaccgtggttcaaaaatcataccacggccgctcggttttttcgcattaaaaatcggacagatgagctcatgtttcagtatactcatctgtccgatatcttttaattcttaatcgagtgattcaggattgtagaatctacgattttcaagaccaaatattttatctgtaaactgacccttgtcagtttttttatatgccttttcaaacatattcattctagcatcgatattatcgatatagcataaaatttctgcttcttttaagtatggcagttttggagaaccatactctaacttaccatgatgagataaaatcatatgtcttaacaacatgatttcttctccttcaatgttcaattcacgagctgcttcaactacttcatcactcgcaatcgagatgtgtcctaataagttaccttcgactgtatacgacgtcgcaacaggaccactcaattctctaactttaccaatatcatgcaaaataataccactatataacaaacttttgtttaacaatggataaatgtcacaaattgattttgcaatacgtaacatcgttaatacatgatagcttaagccactcgcaaagttatgatgatgagaactagcagctggatatgtgtaaaatcgttcttgatattttttcaataaatgacgtgtgatacgttgtaaattagcattttcaatatctagcaaataatgagaaatctcttcttgtatttctgccggtgataaaggtgcaccatctacaaattgttctgtttttaattgatcttcagttgtcgctagtctaatttggttgactttcatctgtttatttccgcgatagtttatgatgtcacctttaacatgtacaatttcttcaggcttgattgttgccatatcattttttgtagccgtccaaaatttcgcttcaatttcaccacttttatcttgcaaatgtaatgtcatataatctttaccttgtgctgttacaccctgtgtagctttatgcactaagaaaaagtgatcaactgaatctccgggatttagattctctatatttctcatcgtttcccgccttcctctattttgtttaatgtaatcacttcttttgatggaacaatattatcttttacacatgtaaagtatagtacttgatagtgttctgataatgatcgtaaataattcaacattttttcagtacgttttttatcaaaatgaacaaatgcatcatcaacaattaatgggaacggataatatggtcttagtaccttaattaaactgatacgtaaagctacataaagtaattcttttgtagattgacttagttcaacaggatcatataattgaccattaacatgtttaaccgtaattgaatcttcattatagttaatcatcgtatatctgccatctgttaaatgcttcaatatttctaccgcttcattaataacttgaggcaaacgtttatctttaatttgtttaatgtgttcatcaactaaactttgtaaataacttaaacttgcccaatcttttgcgatatcattaagttgatttttaagactgtgatattcatgtcttaaattagcaagcgttgtatcagtttccatgtgattgatttgtgcacttaaatcactgacttgtgcttgcatttcaagatattgctcattatattcgtcaacttgagtagccaataaatgatcttcttcttcaagttgtgcagttgttttttcacttaaactagaacttaattcataagaatagttttggttctcaagatatttagttaaatcattaaaacgactcaaattactagtataagtttggtaatcttcatgatgttggtaaaaatcttcttcagtaccaacattgataaaatcgaatagtgctgtaatttctttattattttcttctaattgagcatttaaatgatttaattcatttgtaacaagtttggtattttcagcattaatacgccatttttcattcgtgtcttcagctgatttcaaccattgttgcacatcgtggaataaagataatttgttgaaataaacaaattgtgattttgtaacagcttcagcatgattgtagaatgtatctaattcttgaaccaattgctggcgttgttgatttaaatcactgatatgttgatctaatgctttaatattcgccattgtagaaatactatcaacaattaaatcatttgaaattttagatgataagtataattcatccttaacgttctcaactgtcgattgtaattcatcatgacgccctttcgcatcatttaaacgaccttcaatatactgacgtttctcttctaaaatatctttatttttcaaagcttgttgccagtgatcacgaatgcgatattgctcatcaagatcaaaatctaagtcataattttcatctaaaatggctagttgtgctttaatttcttcgatttcatctgtgatggcctcgctataatctacttcttttgatttagacatgatgataccgataacaaatactaaagttaatactgcgaaaataataccaaacaacatgttgtttgaaataaatgagaaggcagttaaaccaatacctactaatgttaaaagaataaacgttgttcgtaacaatttttgacgtttttgtttttcttgttgctcaatttcgaaacgttctttcaatttgctatacaagttctctttttcgtttaattcaatgacttgttgtgagtattcttttttcttttcaaaagtctcttcaggaactattttttcttcaacagaatctagttcgctatgaaccgcattatcttcgattttattttcttctaaactacgttctaattgtttaatgtatgcagcttgttcttgtttattcttgatttgctcactgacataacttttcattgcctctgaactatctacgtcatgatgcgtttcagaccaaccaatatttgattgcaattcatctttatcacgttgtttattcgcaatatccttttcgattgcagtaagttcaaattctttatttttaatttcattttcttgttgattcaaactaatgaaggcgtcaatatcagattgtttaactggctctaattgagtcgcttcttctttaagttgagctaaacgctcatttcttaaaccaatatctctttctaacgattgcttatgcgctcgtgctttttcgtaacgatccacacctttttctgggaatgtgattggctcaatatttaactgttgttctagagacttccattcttgtgaatgatcatgtaaagcaacctctttttgtttttcttcatgcatttttgataattgatttaaattatgctttaaattctctaatcgacgtgatgatttatctcgatcatctactaagcgatgatatgtttctagctttgcttcttcttcacgaatttgactttctagttgttttaattgctcaatttgttgattaatgatcggatttttacctgattttttatataattcatcttttttacgattaatcacttcgcgcattgacgtgaattcagttgatcctaaagcccctgcttgtaataaataatcttgcaattgtttttcatttagatttctatgaatgtcttgaagccctagtacatcaaatgaaaagataccttgatatgtctttttagaaatataattaagtttcttttgtaaccaagcatcatcacgcacagcaccattaggtaaatatactttcacatcaccttgagcactgcctttaattcgttcaacttcaatctctaagccatcatcaagaataagtactaatttaccaccgtattggttacctagacgtggttctagtcttggctctttagactttttagttggaaatccaaataatatcgaatggatgaatgcttgaatcgtcgatttacccgcttcattttcaccaaaaatttcagtgaagtttttattaaattcaattttacgttgaacaaattgaccgtaaccataaatttcaagtgatttaattatcattttgttcacctctcatttcagcttttaatatttcttcagcacgattaactaatgctgtatggtcgaatgttccataatcgtctaggaacttagatgcccttggatttaaatataaatctgacatcgctttatcaaaaacagtttgatcgactaataattccgctgaaaattcattaactaaaggtgactcatcattttgtgcatattgtatttttaactcatcaatatatacaaattgattttcgttttcttcataatctgtaatcatttcttcaacttgtaataaatcttgaggtgaaattaatgtctcactattaataacaagcgttaaacgataaaaggcttttccttcttctctcacttgttctttaaagttttgaatgacctcgtataaaccttgcttagatgtcttatccgtttcaatagttgcttcttcaaatctaatatactgtgtaggataaaatttagtctttaattttaagtggtcaccctcgattaataagcaacctttttcaccttgctcattaaaatgtctaccttgaatattacctgaatagttaattacaggcatatcacttaattgttgacgttcatgtatatgacctaaagcccaataatgatacaatttactgtttaaatcttctaaaatgaactcggtatatctttcgttaactgaagatttactatacgtaccatgcaagacaccaatatgtatgcctttttggccttgacttgatggatattcatcaatcttgttctcataacttgctctattttcataactaaatccgtgaatataaattgtttcaccagatttagtaattgcttcatacgtctcaactttatttgaaaatacagaaacattatctggccagtttgatgaaatctttgatgataaaggatcgtgattaccatgacaaacataaacaaagatttgttcattttgtaaacgttcaaattgctgttttaagaaaatttcagcacgtaatgttctgttttcactatcaaataaatcacccgcgataattacaaaatcaacatcttgttgtaatgcaatatctacaatatttttaaaactttcataagcacttttttgaacatcctcaaaaattttagggcttatatgactcttagatttgaaaggactatctaaatgtaaatccgaacaatgaataaatttaaccatacatccatatctccttaattaaaggttctaacatcaattttgcaaaatccaactatacaaagcattctaatcactatattcatacttataggtgtagtgattcattagctgatttattaaaaccagtcgccatttttatttcgttaaaaaactattatctacacaataataaagtgctttagtcaaatcgtgatgttttatttattaacaagtttattatttcttcattttaccataatacgcttcatatcgtcgatgaacatatgaaattgagacacatttataacagtttaaaattttatttgtagcgtacgttgatatttttcaaaaatttcagtcggaaatgcaatttccgtagttattaacaccgctagtgaatcaaatggcacattaaagatttacatgattactctactagatttgctcggcagtaatgaccaattagaaactaaatgtcaaaactatcattgcacttaatacgccaaacattttcaggccgttcttaatgagtcattaaaagtgaaacgcttttccatcagtccgatacatgaccgaactaatagtattatgttgaaaactttacacttcaaaatgcaaaaaggaagttaggacacgtttactagcctaacttccgttactgaatgcatctgcccaatttgacagagagcctctaacttccgttatcaaaactaaaaaaactacccacaaagtctcggactctgtcggcagtctattcctctatttaaaggattgaaaaatattattttaatattagtcagcgtaaatttcgtctaatggtttaacgataatttggttgatttcttggaatacttgactcattttttgttcagcattcattaatgcagagatgttttcatctttttcaattgcttgcgcttgttcttgcgctttttgtaaatcttcttcagcaatttcttcaccttgcatttgtttttgttggaagttaatttgagtttcacggaactcgtcgaataactttttagattcttcgttagcttttacattagcgaatgcttctttgattgctttgtattcttcgctttctcttaaagcttgttctaattgatttgcataatcatataaatttactgccatggttatagcactcctttgttgtgatgtttattaaaacgttcgatattactttaccacatctcgcttttttagacaaagattgcaaccaaaccttggaaaaatccaataataccacctaaaatgaaacctaatgacataatcaactttagttctttgttagcaatttctataattaatttttcaatataatctaagtcaaacgtattaatttgttcttcaattaatcctcgtaaatccacttttttcataattgtagataagtgaatcgataatttttcaatgattaaatttgctaatttgctagagagttgaccttctaaataatcaacgaattgaggcattaacgtaaccactggcttattcgcttgtttgcttgcatatgttgttacatacactgatagattttcagcgatttcattaaactgcgatgcatctaacagttcattcaatggtttatctttaaaagtttgatattcattggtaattaacgatgtcacaattgttcttgctttaggatgagatgttaaacgtataagttcttgttgaatgcgatctgcaatactctcttttgtcataaacatttgcaacataccaattaacttacctttctcattgaaaaaagtatccaacatatcattaatatcttgtgtgccttttgcagatgataaataattccttgcacgatcacataataagtctgttgcgttatctacatgctgatttaaaaatgttacaagttgatttggcaataaagatgctattgtttggttttgatgctttgtataataattattcaattgtgattcaatatattgatttccattagtttgtaatacttgttctaaatcaatatcgatttgagaagtaatttgttttattgacaattgatctttcgtcaacttttgtaactgctgttgaatcatagattctattgcttgctgtgattgctcgcttttcaatttttcattaattaaagtttctgtaagcaaatgctcttcaatcacttggccaattttagttgcaatttcttcgcgtcttttcggtattaaacctggtgtaaatgggactctaaatttaaatatatagtatggtttaaaggggtgaaacagcattctaattgcaattacattagtaatgccaccaattatcgcccctactacaatcataaatatgataataaatagtgcattcataattttgactcctttgtgacaacatagttattcattataccactatttttattttttaattcattaatcatttcactttctgctcaatttattattagtttacatacaaaaagcgatgcctcacctctcgaaacaggtgtgttacatcgcttttattatttattaaaagtatataggcctagatatgtactaattcttctttagcatttctgttaaagtatgtttcagcttctctcattttagaagtaccgaaaattggttggttatctggatttaatacacgataaatattgcttactttgttactttgtaaaatgtacccattacgagtctcaatgttattccaataaatatcacttgttggtgcatggtttggatatgcacaatgatttcttgaaattgtttgaacgatttctaatggatcacagccaaatgtactgtttaatacttcagagtctctgaataatgcacaaattgaaatacaagttgtccagtttggtaatactctctctttttcgatttgtactaaagtctttttagaaagtccaattgtttgcgccatagtatcttgcgtataaccagcctctatacgaaccattttaaattttgtttgaattaaatctgtaaaactctgtctatccattctgttatctacctttctgtttggggaattttatccggacacaagaaattgcaataatacacatttcttgaaacacagattacatcttaatatatttttaataaaatgaaaagagtcaatttcacatttgtattaaattttgatcaagtcaacaagagttaagtttactttataatgaagcgaaagtaaatgaagtaaaattttatgcataatcactagatttgataaaacttacacttttataatgatatcaaatttacaaagaaaactgtataataaaccctatcgctataaaaaattcatcaaaatcagattaaaaattgtctatttttcgacaaatatttaaaagctcattctaaatcaacttattttccattgcataaattgctgcttgtgtacgatcgctaacttgtaatttactaaatatatgactgacatgtgttttaattgttttttcagatacaaataaagtttctgcaatctctttatttgttttacctttaaccatttcacgtaacacttcaatttctctctttgacaacttattcgtgtagtgtggtttttggctaactgtttcgaatacatcttgtgccttaggatgtatcattttttcaccgttcataactcgtctaatagtttcaattaattgctgaggctcaacgtctttcatttcataaccatcagcacctttattgattgctgaaattacatgttcatcatcaacataacttgttaataccaaaactttaatatccggataatgtgccttaatatattccgtaatttcaataccattcatgccaggcatcactaaatctaatagcacaatatcagggtgctcatgctcttttaaatattctaaaaatgtttctccatctgcaaagtcttgtaaaacttctatgttttcaatcgtggataataaaaatcgcaatccttgtcgcacaatataatggtcatctactaatattactttgttcatgggttatctccttaaatcaagctattttataggaattgtgaattgtatttgtgtaccctttgttggctgagaatgaaaggtcactttacctcttaataatttaactctttgttttatgttattaataccgtgtgatgaagctatctgaacattatcgatctcaaatccttgaccataatcaatcacgtcaatatatagtatatcgttcatttgttttaatgtaagatccattttattcgtatcagcatgtttcttaacattattaatacactcttgtaatgctctgtatatgttttcttcgatttcattagataaatcgattaaaccttctacatttacatttaattgtatatgcattaatttactatatgctgtcaaagcatgaattaaaccttgctcaagtccaactggcttaagttgccaaatcaatgcacgcatttcattaacggcattttgactcgtttcctcaatcgtcttgaatgcttgtttagcgatggattcgtttgacatgccatacgcagcatgtgctgttagttttacagaaaataacatttgatttactgaatcatgtaaatctctagctaaacgattacgttcattaatttttgccgcttctttttcacggtctgttaaataaatacgtttgatggctgaccctaattgaaatgcgacagactctagcaactctaaatcttcatcgctatatatttcagtatttggagacgctacatttaaaatgccgaattgttcttgacccgatttaagtggtaccgttgcatgatgtgtaatattgtcattttggctaggaaatgctttagaggctaagttaatacgagaacaattgacgatattcgacgctttcattagcctacgttgattaaatgctttcacacaccaacaagacccatctttaatatagtgacagtggtctgctgtcaaagattgtggtagagccacatgtgatacaagttcatgttcacctacgctattgatgaaaaatatccagcctgtcgtgaaattactgccctcaattaaatattttaacgcaccttgggtcatgctatacatttcagtttcttcgtttaaaaattcggcaatctcttttaataaagctagtcgcgtcctttgttccatcaaatcgctccaattcatttttacgtgtattaactattatacattgagttattatatttttaaatcttagacgtaaacatgataaaatggccttgattactcaatagttatatttcggagaactgatttgtgatatgatattaaagactataggaggattttatgaaatttaaaataccagaaaactttaatgacttaagtttacgagatattttccaacaacttaaggtacctaaaaaagatttacatcatttaaatatgtctaaagatattactattaatgataaacctgcgcgattaatggataaagtgcatactggcgacgatgtatttgttccaaccatcgatgaaaaaagtaattatgttccaagttatcgttatgcacaaattaaatacgaagacgatgatatggcaatcgtaatgaaacctaaaggtgttaagactcaccctaatgatttaaaagaaagcaatactttaatgaatcatgtgatttacactattgatagtgactatgtcgaaccaattcatcgactggaccaggaaacagtaggattattaattgttgctaaaaatcctttaatgaaaaaaaattcttgatcgcatgttagaagacaatgatattacgcggatatacaaagcaaatgttaaggcacttttacctttaaaaccacaaacgattgatatgccaattggtaaagataaattccattcgaataaacgacgtgtgtctcctactggacagcgtgcaattacacacattttaacttcaaaaatgataaaagaagctgtgtgccaacttgaaatcaagttggatactggacgtactcatcaaattcgtgtgcatttagctgaaattggtcaccctgttattggtgatcctttatatggtgattcaacgttaagacaattagaacttgaaagttacaaaatagagtttgtgcatcccttgactaaggaagtcatttccgtttctttggatgactaatttgattagttttgcatgatatttaaacatgcaataccgcattgtaactaaatcaagtatcaacttaaatcggatagatggaaaattattaattttttcagatgttcggtttttttgttttttacgatgcttaggattttatattttgatattttagtaattattcattttataacatccttggataatgacttgtagtctttttcaactgcgttacgtgtatctatggacaatacatgacatcataagatttttatcacaggttgtttggccaatacatgtacaacaattcatcatataaaaaataggttctataataaaacggactccatgaaaagtttttccttttcatggctctatatcaaatcagacttataagttcaatttgacatagacaaaaaataaagcttgaacactacatctacctgtaatgcccaaactttattttatattaatatttaattaatgaggatctaccatatcttctggtttaatccatgcttcaaattgttcttctgtaacatatccagtttgaattgcagattcttttaaagttaaaccttctttatgggctttcttagcaatttgagctgctttttcataaccaatatgtggatttaatgcagtaactaacattaatgattgatttaaataattatcaatattctcttcgattggttcaatgcccactgcacaattgttattaaatgtttccataccatcagctaaaagataaattgattgtagtgtattatgcataataactggtttataaacattcaattcaaagttaccttgtgaacttgcgaagccaacaactgtatcattacccattacttggactgcaaccattgttaacatttcacattgtgtaggattaactttaccaggcataattgatgaacctggttcattttcagggatagaaatttctgccaaaccagctcgtggccctgaagccaaccatctcacatcattagcaattttcattaagtctcctgctaatgccttcaatgttccatgcaattgaacaacttcatcatgcgctgtaagtgcgtggaatttattttcagaagatacaaatggataacccgtattttctgaaatataatgtgccactttatcaccaaattcaggatgcgcattaataccagtaccaacagccgtaccaccgatggcaagatttaaaatgtgcttcttagattcagataacattgtttcacaacggtcaagcatataacgccagccactaatctcttgtcctagtttgatcggcgttgcatcttgtaaatgtgtacgaccaattttaataattgaatcaaatttatcttctttttctttcaaagtatttcttaaaagttttaatgcaggttctaattttgtttcaacctcttgatataatgcaacgtgcatagcagttgggaatgtatcattcgaactttgagatttatttacatcatcatttgggtggatactttcatcactttgatgatcttttaaatacatattagcaacataacttactacttcgttcacattcatattactttgtgtaccgcttcctgtttgccatacaactagtgggaagtgttcatctaattcacctgataaaatttgatcacatgcgtatacaatggcatctttctttgcctcgcttaattttcctaaatcaaaattagctattgctgctgcacgctttagttgtgcaaaaccataaactacttcgattggcatacgctctttaccaactgggaaattacgtttacttctttctgtttgagcaccccaatatttatctgcaggtacttctatttctccaaaagtatcatgttcaattcttactgacattcaatttctccccttatcactgtttatttaactgtagtatatcattaaataatttaattgagcaatttatgattaaaacgttttcataatttgaaataaaaatacactaatcgcacgtgttcaccctttattacagtgatacggtcatacgattagtgtgttatctatcattatttagttattattgaactaagtttaattacgatactttgttttagtagcttcaaccgtagcaatagctgtaagtatatataatacagcactaacaattgtcgtatatggatttagagcaacaagcgtacctaaaactcctgttaaactcgcataaaacccatcaagtgtataatacaatattgctgttattaataaacaacaaattacactgattacaatacctgattgattacttttaatgaatgtttgcgcattaacatcatcaattaatccttttgataaattgagttgtaattttattactttgaaaataacaggtaaatataatgccccaattgccaatggaaaagctttaattgatattaaacttataataactgttgctatcaataattgaatccagtattttcctaacataaatatataaatctcctctaatttcattcttcaatagcatatcataatcttggcatattaagaaacgcggtttaatgatttcattaaaaatattactgatagatgacttctttcaattatgtctggagtaattaattatcaattccgtttaaatggtgttttaatatttaaaattgaacttttgatatattactatgtctggtacacaaatcaatgttttatgctttacaaagttatattggcagtagttgactgcagtccacaacatagaggcttcggaatgtcagcttctatttcatgcaagttggtggagctccaacatagtggaattggattcccaatttctacagacattgcaaattggggaaacgggccacaaactcagaaactggtggaaagtcagcttaaaataacatgcaagttggcgaggccccaaaatagtgagatcggatttctaatttctacagacattgcaaattagggaaacgggccacaaactcagaagttggtggaaagtcagcttaaaataacatgcaagttggcggggccacaacatagaaaaattggatcctcaatttctacaaacaatgtaagttggggaaacagccccaacactgaaactagcagaaagtcagcttctatgaatataataaaaaagctaggtaacaaaatgctacctaacttcatattcaagataatcaatcctatttgatatatgttctatactatacattatttacatgataaataactgaatattacacaattataatactttactgactgtcttcttcagaattcttttcttgatcattttgatcagagatttgttccatttctttacctaattcttttaaatcttcaaaatccgttaccatactgttttcttcttcatgataatttaattttggatctttgtctttagacataatcaatacctcacagatttttaattaagcaaagcgtgacgtaaagtaagctttaacatcttcaggtaaacctgcagccgcttctttatcaagaataacatttaccattctatgtgcttttaaatcggctggttcgaagcttgttttaccattttcttgatataatttttcaactacatctcgtttattagcacctgtcactactaagaaaatttctcttgcttccattagtccttgacgaatactaacatttaacttaccttgctcatcgatagaaacaacttgtaatgttaatttccctttattttctttagttttaatcttatcagcgattaattcgattgcatctttttcataagcaattggataaacttgacctgctggtacacctaacgcttcgaaatatgattttttatcgtcataatctaaaatatttatttggctaaaatcaacagcatgtttttcaacatttttctttaattcatctagaactggcgcttgatctgtatctaaatgaaaacctgcaattgtagtaggattattgttaaattgctttctaataatatcagcagcatattctgctacaagttgactattgtcaaagactttaaagttcattgccatgatttctacactcctcttagtttgcattttacataaaaacggcgatattaataattattataccctaactttcaatatatcaaaccatttaactttaacatgcttatactctaaatatagcacttaagcatcatttttataatgaaaatgagtaaattttaattcaatcccggaaaatcttgttgacgtaacgcttcataaattaacaacgcagcagtatttgataaatttaatgaacgaatatgttcactcataggaattcttaacgctgtgtcttgatatttctctttcacccagtctggtaatcctgtcgtttcttttccaaaaatgaagtaaaaatctttgtcatgatttgaaaaatcaaaatcactataagtctttttaccaaattttgttaataagtaatactcgccatttgtgacttcaaaaaatgcttcaatactatcatgatacgtaatattcacaaattcccaataatctaaaccggctctttttaacattttatcatcagttctaaatccaagaggtttaattaaatgtaaatgtgtgtttgtacctgcacacgtacgtgcaatgttaccagtattagctgggatttctggttgatataaaacgatatgatttgtcatattactattctctccttgtgtctaatccttttatcatttcattctgaacttctgcatcctcttgatcataattagcattgataaaatctcttgcttcttccccaagaatttgaccaatggcccaataagcagttgctcgaatcaacggtctttcatctgttgttgcaacttttttcaattctggaattgcatccacttcattaaaatgcgccaatgctaaaatagcatttcgttgtatcggctttttaccacgccaagcacctgcaaggtgaccatatgtttgtttgaattctttattagacatacgtagtaaaggtactaatcttggctttaaaatttctggttccaaaatgatgtcatcttgttcggtattaatacctctatttttcggacaaacttgttgacacgtatcgcaaccatataatctattcccaattttataacgatattggtcaggcatatagccttttgtttgcgttaaaaaactaatgcatttctgactatttaattggccatttccaactaatgcacttgttggacaacgatcaacacaaattgtacaatcaccacagctatctaataatggatcatcaggttcaaaaggtatactgactaacatttcaccgaggtatgtccatgttcctagtttaggattgatgacaaagccattacgaccaacaaatcctaaacctgcacgttctgctactgccctatctgataatacacccgtatctaccatagatttgatttcaacatctggaactttagattcaataaatgcagctaacatgtctaatcgtttacgcataattgtatgataatcttgaccccacgatgctctagcaaataagcctctgcgatcacctctaacactcttaggtgcacctttcagtttgttaggataaccaactgcaattgctatgattgaccttgctgttggtaaggataatttaggctccgttcgtaaagcaatatcagattcttcaaatcctgaggcataaccatttgcatgatatgcttctagcttttgcttcaattcatcaaagggatcggcagtagtaaatccaatactgtcgataccaattgtatatgcatagtcaatgatatcttgctttaattgctttgtatccaatcgtatgccccccataaaataatactatgttattttaacacaaccattattcatattgaggtttcatttcacataattttaataataaaaagcttgaatatatgatataactttgtggtgcgtatcatatattcaagcttcgttaggttgttataatactcttgctaagaaattttgtgttctttcatgttgcggttgttcaaatatttcgactggtgtgcctgactctacgacaacgccatctgccataaatatgactttgtcacttacatctttggcaaatcccatttcatgtgtcacaaccaccatggtcataccttctttggctaggtctttcattacttttaatacatcaccaactacctcaggatctaatgctgaagttggttcatcgaataaaataacatctggatgcattgctaaagctcttgcaattgctaccctttgtttttgaccacctgataattgattcggatatacatctgctttttcttttaatcccactttatctaataacgacaatgcttccttatgtaattcatcgttattatctttctttaataatttaggagctaaaataatattatcgacaacttttttatgtggaaataggttgaagttttgaaataccatacccattttttgacgtagtttatctacttgtgtccctttttccgttaagtcattgccttcaaaaatcacttgacctttagtaggtacttctaataaattcatacatcttaacaatgtacttttaccactaccagatggacctattattgctactacttccccttgattgatttcaagattgatatcttttaaaacttcattatctccaaaaactttattaagattgtttattttaatcactggcattcaatctcccttcaatcatgttcataatgcgtgtaagtacaaatgttaagacaaagtataatgctgctgccactattaatggtgtgaatgggtcaaatgaaataccttgaaccacttgtgcattaaacataatttcgccaactccaattgttgacacaatagatgattctttaattaaagtgacaaattcattacctaaagctggtaaaatatttttaattgcttgtggcataattacacttttcatcgtttgtctataattcaaacctagactacgtgcggcttccatttggcctttatcaacagcatttatacctgcacgaataatttcagcaatgtaagctgaggaattaataactaatgcaattgttccacaaacaagagctgaaatgtctagtcctaatgcagcagttataccaaagaatacgataaatacttgaactaacattggtgttcctcttaatatttcgatatagatagaagcaatccatgaaataatttttattttacttaatttcattaacgcaacgaatgcacctaaaatagaacctaatgcaacaccgataagtgaaattaatattgtaatcttaattcctttcaagaaaaaactaccatacttagaaataaaaccactgtcatcattcatcgcatttgcagcattagtcatatatttatcgattaatcctttatctttaacctccttaatcgttttattaatttgtgacaataattttggtgaatcttttggcactgctatcactgtatctttttcttcttcattaaatttcacattggaaattcctaatttaggattttgttttaaatatgcttctgctacaggtttttcaactacagcaccttcaacctttccacttttcaatgctaatataacgtctggtaaacggcttaatgaagtaatagatgcattttcaatttcggtttgagcgattttttcttgttcagttcccttttgtgcccctacttttttattattaaagtctttgatatctttatattcattaactttatctttctttacaagcatgatatttttagtcatcatatatgaatctgaaaaatcaacttgcttcttacgttcaggcgttgaagtcattccggaaataataatatcaatttttccagttttaagagctcctaacaaactatcaaatgacatattgacgatttttaattttaaattattatctttcgcaatttttttagctaaatcaatatctacacctgcatactcagtcttaccattaactgtatgctcaaattccattggtgcataatctgcagaaagacccactctaagttcaccgcgttctttaatcttctcccatgtttgatcttgttcagcatgtgctgtgggattgatatacaccatagcactgctaattaacaaccctaatactaatataaacctaattaaacacttcatttatacagccctccctaattaatattcataattatacatattaatacattttgatgcaatagtgttttataaatgtatttttatcaatataaagaaaagcttctttttaaaagactgtacataaaaaatccgctattatacgtgaacaaatctcacattttaaaatcaatcaaaaaagcgctactatcaatatcttattgacagtaacgcctatatttatcatatattaaaacttattcttgtcatcaagctataaattattgttttggaacttcaaatttataaatatcattagaatatataggaatgaattttttacacaattcatgaacaataaatgccgatacaaatggtatgacaaaataaccaagtgctaataaaataatattcattgttggatcacctgacattcggttaaatgcatttattgggccaactaatcctgtatatccaaatccagcagacaatggtgttcctttaacctgaagaacgtaagcaatgattccagtaattattccatttatagtcaatggtatcgaaataattaaatttttcaagtaaactgggatcatcatttttgcagctcctatgagtaaaactgcatttacaccaatagaattgacacgcaatgagccaaataagaaagtaacacaggcagccactatacctaggtttgctgctccacttcctagtccgtttaaactaatcgcagttgcaatcgctactaacgatattggtgttaccattaataatgaaaatgccacactaataagtatagacattaacaacggatttaagtctgtaaaagaatgaattacatttccaattgcttgagtaatttttcgaatgtaaggtaatgtgattagaccgatacccccactaacgataggtactaaaactggtaatataattaattcaaaagatccaagtttgttttgtaataccatatatataagacatgcaataataacaaccaaactcgtatttataatgtcacctataccttttaacataaaactattattgctatatacaacagcacctgaaccaatcatagctgatgtacctactatagcagcacctgcaccattaaatttaaattgatgagcagctaaaaccccaataataaatgccataaatgattgaattagtatcactaactgatacgttaattctaaaatttcattaccacttttaaatatttttaatacttcacctaataaagcattcggaacaagtgcaataacaacaccagcaccaatagaatttaaaatcttactgaaaaactgtttattatcagcattatttgcgttactcataaacgacctccaatttgaacattaaactcatcatattatagaaaattaactttaacaatgattagttggctaatttaatctaaatataacaatccacaaattgaataaagcaaatttaaacaatctactcactaatcaatgtcatgttaattttaaaatactactaattacatcctgtgactaataatgtaataaattgtaaatattaaaatagccatattactattaagatagataaattgaatcgacttggtataaagcacaataaaatagcacttttacaaatatattattagaaaagttgaaacaaatatataaccccagataatataatcattatcattaatgtaataccaaaaaaagaagttaaacaggttcttcatcttttatggtgggaaggtaaaacttcctgctttttttaatacacaaaaagcgcaattgcctctataatttaaagtgaccaaacccaaactaaaggagacaagtgcgcctatgtgtaatgataccttagaattactaagaataaaagatgaaaatataaaatatataaaccaagaaattgacgtcattatcaaaggaaaaaaagcaacagtggttaatgctgtactaacgtataagccttcggcctgttattgttgtggagttaaaaatgaaggacaaattcataaacatggtaagcgtgtttctcgtattactttacttaaaactcaagggtataacacatacctcaacttagctaaacaacgttttaaatgcttagaatgcaatggcacttttactgctaaaacgtcaattgttgatgagtcgtgttttatctcaagatgtgttactcaaaaagttatagaagaagctactaaagttaaaacagagattgatactgcagaagataactgtatctctccatctactgtaagtcgtattagaactaaagcggctaattcattacgaattaaaccctttaattgtttgccagaacacatcgctatggatgaatttaaaagcgttaaaaatgtaactggatcaatgagtttcatttttatagataatgatactcatgatgttatagatattttagaaaatagaactacaagattcttgcgtgcctatttcgagcgattcgatttaaaaaatcgacaacaagttaagacggttactattgacatgtatgaaccctatgtccgattatttcgcgacctatttcctaatgcagctattatttttgacagattccatatcgttcaacatttaaatagagaacttaataagtatcgtgtacaagttatgaatgaataccgtaataaaaaaggacctgattatacaatttttaagaataactggaaagtcctattgatggatactagtaaaaccatatttagtaaatacagatggaataaatcttttaaggcttataaacgctcatctgacattgtagaattcatgctttcaaaagacgatatactacgacactcctacgaacttgtccaaggattacgaaaagacctaaggttatgtaattggcctaaatttattaatcgtttaaattcagttagtaaaaagtctgtgagtaagggtgtatggaaagtggttaaatattatagaaaacatcaaaggatgttaagaaatacaatttattacccagcatttaataatggtgctatagaaggaattaataataagataaaattaatcaagtgaatttcttttggttacagaaatttcaacaactttaaagcacgtataatgatgattttcagcttgtacaaaggagaaaaaaagaagacaaccaagcccaataatggactggccgcctaataataaaaactctaaaagttgtattttaaaaatagttctttaaattatatacccaccacatttggtggagaaccgttaaacaatgcatagttgcttaacttccaatattgaactcatcattacaatttgacatagagtctattaaagcgtgtgccatttgagtccacttttatttgtattgtatagagagaaataaaaagaaaccttgttttacaaggtttctaatacgttatgttatgtaaataacagttaattataccggtggtcggggtcgaaccgacactccacaagtggaacgggattttgagtcccgcgcgtctgccaattccgccacaccggcttaatggtaaacaaaaaacttccctttggaagcaattatggagcggaagataggatttacacctatacctcgttccgggaaggaacgtgttctaaaagttgaactactcccgcaaatattaaattatggagcggaagataggatttacacctatacctcattccaggaaggaatgtattctaagagttgaaatactcccgcattattattaaattatggagcggaagataggatttgcacctatacctcgttccgggaaggaacgtgttctaaaagttgaactactcccgcataaacctggaggcggcaaccggatttgaaccggtgataaaggttttgcagacctctgccttaccacttggctatgccgccaataactgggctagctggattcgaaccaacgagtgacggagtcatagtccgttgccttaccgcttggctatagcccattaataataagggcggctgaaggggatcgaaccctcgaatgtcggaaccacaatccgatgtgttaaccacttcaccacagccgccatggcaggggcagtaggaatcgaacccacaccaaaggttttggagacctctattctaccgttgaactatgcccctattaaaaataataaatggaggggggcagattcgaactgccgaacccgaaggagcggatttacagtccgccgcgtttagccacttcgctacccctccataaatggtgccggccagaggacttgaacccccaacctactgattacaagtcagttgctctaccaattgagctaggccggctaagaaatggttcaggacagagtcgaactgccgacacatggagcttcaatccattgctctaccaactgagctactgaaccataataaaaatgtaatgatggcggtctcgacgggaatcgaacccgcgatctcctgcgtgacaggcaggcgtgttaaccgctacactacgagacctataaaatattgcgggaggcggatttgaaccaccgaccttcgggttatgagcccgacgagctaccgaactgctccatcccgcgataataaaaaataatggcggaggaagagggattcgaacccccgcggcccgttaaggccctgtcggttttcaagaccgatcccttcagccggacttgggtattcctccattattataggtaaatcgctattaattataaaattaaatggcggtctcgacgggaatcgaacccgcgatctcctgcgtgacaggcaggcgtgttaaccgctacactacgagaccattagtaaaacggaggaagagggattcgaacccccgcgagccgttaagcccctgtcggttttcaagaccgatcccttcagccggacttgggtattcctccaaaattatatggaccttgcaggactcgaacctgcgaccgaacggttatgagccgttagctctaaccaactgagctaaaggtcctaaatataattttacaactaataaatagtggcggtggaggggatcgaacccccgacctcacgggtatgaaccgtacgctctagccagctgagctacaccgccttatatagtttgtaaataatatggtggagactagcgggatcgaaccgctgacctcctgcgtgcaaagcaggcgctctcccagctgagctaagcccccataataattacagtatatcgggaagacaggattcgaacctgcgaccccttggtcccaaaccaagtgctctaccaagctgagctacttcccgtataattaacgcgcccgataggagtcgaacccataacctcttgatccgtagtcaaacgctctatccaattgagctacgggcgcatatgtttttattgaaaatggtgccgaggaccggaatcgaaccggtacggtgatcactcaccgcaggattttaagtcctgtgcgtctgccagttccgccaccccggcactataaaaatggagcagaagacgggattcgaacccgcgaccccaaccttggcaaggttgtattctaccgctgaactacttctgcatatgcgggtgaagggagtcgaacccccacgccgtaaggcgctagatcctaagtctagtgcgtctgccaattccgccacacccgcaaatggtgagccatagaggattcgaacctctgaccctctgattaaaagtcagatgctctaccaactgagctaatggctcttccatggtgccggccagaggacttgaacccccaacctactgattacaagtcagttgctctaccaattgagctaggccggcaatatgtaagaataaatggtggagaatgacgggttcgaaccgccgaccctctgcttgtaaggcagatgctctcccagctgagctaattctccgatttaaaactgcctggcaacgttctactctagcggaacgtaagttcgactaccatcgacgctaaggagcttaacttctgtgttcggcatgggaacaggtgtgacctccttgctatagtcaccagacatatgaatgtaatttatacattcaaaactagatagtaagtaaaagtgattttgcttcgcaaaacatttattttgattaagtcttcgatcgattagtattcgtcagctccacatgtcaccatgcttccacctcgaacctattaacctcatcatctttgagggatcttataaccgaagttgggaaatctcatcttgaggggggcttcatgcttagatgctttcagcacttatcccgtccacacatagctacccagctatgccgttggcacgacaactggtacaccagaggtatgtccatcccggtcctctcgtactaaggacagctcctctcaaatttcctacgcccacgacggatagggaccgaactgtctcacgacgttctgaacccagctcgcgtaccgctttaatgggcgaacagcccaacccttgggaccgactacagccccaggatgcgatgagccgacatcgaggtgccaaacctccccgtcgatgtgaactcttgggggagataagcctgttatccccggggtagcttttatccgttgagcgatggcccttccatgcggaaccaccggatcactaagtccgtctttcgaccctgctcgacttgtaggtctcgcagtcaagctcccttatgcctttacactctatgaatgatttccaaccattctgagggaacctttgagcgcctccgttaccttttaggaggcgaccgccccagtcaaactgcccgcctgacactgtctcccaccacgataagtggtgcgggttagaaagccaacacagctagggtagtatcccaccagcgcctccacgtaagctagcgctcacgtttcaaaggctcctacctatcctgtacaagctgtgccgaatttcaatatcaggctacagtaaagctccacggggtctttccgtcctgtcgcgggtaacctgcatcttcacaggtactatgatttcaccgagtctctcgttgagacagtgcccaaatcgttacgcctttcgtgcgggtcggaacttacccgacaaggaatttcgctaccttaggaccgttatagttacggccgccgtttactggggcttcgattcgtagcttcgcagaagctaaccactcctcttaaccttccagcaccgggcaggcgtcagcccctatacatcaccttacggtttagcagagacctgtgtttttgataaacagtcgcttgggcctattcactgcggctcttctgggcgttaaccctaaagagcaccccttctcccgagttacggggtcattttgccgagttccttaacgagagttcgctcgctcaccttagaattctcatcttgactacctgtgtcggtttgcggtacgggcacctattttctatctagaggcttttctcggcagtgtgaaatcaacgactcgaagactcaatgtcttctccccatcacagctcagccttaacgagtaccggatttgcctaatactcagccttactgcttagacgtgcaatccaatcgcacgcttcgcctatcctactgcgtccccccatcgattaaaacgattataggtggtacaggaatatcaacctgttatccatcgcctacgcctgtcggcctcagcttaggacccgactaacccagagcggacgagccttcctctggaaaccttagtcaatcggtggacgggattctcacccgtctttcgctactcacaccggcattctcacttctaagcgctccacatgtccttacgatcatgcttcaacgcccttagaacgctctcctaccattgtccaaaggacaatccacagcttcggtaatatgtttagccccggtacattttcggcgcagtgtcactcgactagtgagctattacgcactctttaaatgatggctgcttctaagccaacatcctagttgtctgggcaacgccacatccttttccacttaacatatattttgggaccttagctggtggtctgggctgtttccctttcgaacacggaccttatcacccatgttctgactcccaagttaaattaattggcattcggagtttgtctgaattcggtaacccgagaggggcccctcgtccaaacagtgctctacctccaataatcatcacttgaggctagccctaaagctatttcggagagaaccagctatttccaggttcgattggaatttctccgctaccctcagttcatccgctcacttttcaacgtaagtcggttcggtcctccattcagtgttacctgaacttcaacctgaccaagggtagatcacctggtttcgggtctacgaccaaatactaaacgccctattcagactcgctttcgctacggctccacatttactgcttaaccttgcatcaaatcgtaactcgccggttcattctacaaaaggcacgccatcacccattaacgggctctgactacttgtaagcacacggtttcaggttctatttcactccccttccggggtgcttttcacctttccctcacggtactggttcactatcggtcactagagagtatttagccttaggagatggtcctcccagattccgacggaatttcacgtgttccgtcgtactcaggatccactcaagagagacaacattttcgactacaggattattaccttctttgattcatctttccagatgattcgtctaatgtcgtcctttgtaactccgtatagagtgtcctacaaccccaacaagcaagcttgttggtttgggctcttcccgtttcgctcgccgctactaagggaatcgaattttctttctcttcctccgggtactaagatgtttcagttctccgggtgtgccttctgatatgctatgtattcacatatcgataacatgacataactcatgctgggtttccccattcggaaatctctggatcaaagcttacttacagctccccaaagcatatcgtcgttagtaacgtccttcatcggcttctagtgccaaggcatccaccgtgcgcccttaataacttaatctatgtttccaccatttttataagtcaaacgttaacatgaagttacgttcttttataaaaagatttaaacgcgttattaatcttgtgagtgttctttcgaacactagcgattatttcttatgaattcaagcttatttaaaactctttattcactcggttttgcttggtaaaatctatattttacttacttatctagttttcaatgtacaaataatggtggagactagcgggatcgaaccgctgacctcctgcgtgcaaagcaggcgctctcccagctgagctaagcccccaaataggtattaaattaatggtgggcctaagtggactcgaaccaccgacctcacgcttatcaggcgtgcgctctaaccagctgagctataggcccattaatttgaatgaacaaacattcaaaactgaatacaatatgtcacgttattccgcatcttctgaagaagatgttccgaatatatccttagaaaggaggtgatccagccgcaccttccgatacggctaccttgttacgacttcaccccaatcatttgtcccaccttcgacggctagctcctaaaaggttactccaccggcttcgggtgttacaaactctcgtggtgtgacgggcggtgtgtacaagacccgggaacgtattcaccgtagcatgctgatctacgattactagcgattccagcttcatgtagtcgagttgcagactacaatccgaactgagaacaactttatgggatttgcttgacctcgcggtttcgctgccctttgtattgtccattgtagcacgtgtgtagcccaaatcataaggggcatgatgatttgacgtcatccccaccttcctccggtttgtcaccggcagtcaacttagagtgcccaacttaatgatggcaactaagcttaagggttgcgctcgttgcgggacttaacccaacatctcacgacacgagctgacgacaaccatgcaccacctgtcactttgtcccccgaaggggaaggctctatctctagagttgtcaaaggatgtcaagatttggtaaggttcttcgcgttgcttcgaattaaaccacatgctccaccgcttgtgcgggtccccgtcaattcctttgagtttcaaccttgcggtcgtactccccaggcggagtgcttaatgcgttagctgcagcactaaggggcggaaaccccctaacacttagcactcatcgtttacggcgtggactaccagggtatctaatcctgtttgatccccacgctttcgcacatcagcgtcagttacagaccagaaagtcgccttcgccactggtgttcctccatatctctgcgcatttcaccgctacacatggaattccactttcctcttctgcactcaagttttccagtttccaatgaccctccacggttgagccgtgggctttcacatcagacttaaaaaaccgcctacgcgcgctttacgcccaataattccggataacgcttgccacctacgtattaccgcggctgctggcacgtagttagccgtggctttctgattaggtaccgtcaagatgtgcacagttacttacacatatgttcttccctaataacagagttttacgatccgaagaccttcatcactcacgcggcgttgctccgtcaggctttcgcccattgcggaagattccctactgctgcctcccgtaggagtctggaccgtgtctcagttccagtgtggccgatcaccctctcaggtcggctatgcatcgttgccttggtaagccgttaccttaccaactagctaatgcagcgcggatccatctataagtgacagcaagaccgtctttcacttttgaaccatgcggttcaaaatattatccggtattagctccggtttcccgaagttatcccagtcttataggtaggttatccacgtgttactcacccgtccgccgctaacatcagagaagcaagcttctcgtccgttcgctcgacttgcatgtattaggcacgccgccagcgttcatcctgagccaggatcaaactctccataaaaattatgatgtttgattagctcataaatactaaataatgtttgtaacttatagttacgtttttggaattaacgttgacatattgtcattcagttttcaatgttcgtttgtcacttacaagatttaattataactcgtaagtttttgtaagtcaagaattatttttaattattttatttctaaaaaataaatttcctaactcaattaattcaacaaatattattttaatatgtatttgttcgaatttcaatagtcaaatttacactttattaatattttaaatcaacaacttaaaacatttgttttttaaatattagtgccgtttgacgacttttatataatatcaagttattctagtagagtcaacataaaacaacacttatttttgtttaaaaattactgttgaagggattattttctattcgtaagtactatatgtatttaaagtgtaattccttatgctttttacttcagttttacaaacaaacttatactcactttatggatagttatttagtagaccttcgtttgaatatttttatgtttatttataaaggatactagttattagttaataccacttccgtagttagaatattcttttcttcaatttaaatatttttcagaataagcataaaaaaagttaaacaactttcatgtcgtttaacttcttaaatattacgcttacttatatgaagtaagctaacgcttttttaatttgtcatactaccaaagttaaattatttatcttggcattctttacaaactccataaatttccattcgatgatgtgttacgtcaaagtcagtcatatgctgagctaatctttcaatttcatttaactgtggatattgaaaatcaacaatcttaccacattgttcacatataatatgataatgattatgtgtattaaagtcgaatcgacttgatgagtctccatatgttaattcttttacaattccaatatctttaaacactcttaagttattatatattgtcgcaacacttatatttggaaaatcaggtgaaagtgcttgataaatttcatcagctgttggatgagtatgtgaagaaattaaataacgtaatattgcttgtctttgaggtgtaattcttacgcctgcttgtcgcaatgatgcaattgattcttctagttcatgttcaattgattctatttcaacactcatctatatcaccatctttcttatataataattattattacttactataaatataactgtagtattgcgcgcgtgtcaatatttacatgatgatttcatttaatagccttttttagcatcaacttcattctcaattagaccattcttattgagaaaattaactagattgtttttaaaaatatctaataagtcatactttgcttcataatcattaccagttatatgcgctgttatagttacattatccaattcatataattcatgattaggtttcaaaggttcattttcaaacacatctaaatatgcatgtcgaataactttactttttaatacttctattaagagcgcttctttaactatgctacctcgtcctatatttataaaaagtgcttcatctttcattaattcaaaatgttttttctttagtaaatgaatcgtttcttgcgtttctggtaaagcatttataataatgtcagcatttggtaatgtgctttcaagtgattcgatagtatatatctcgtcaaactcatctttgttctgacctgacttgctcagaccaattaaattcatattaaaagcctttgctaacttcgcagttctagtagcaattgcacctgtacctaaaaataaaactgtttgtcctgataggcgtttaccagttattttcgaatcatatatatgttgtcgttggttatcatatgatagtttcatctttttataatcatctaaaatgaaagctaaaatgtattcagataattgtttagcttgaacaccttttccattagttaaaagtatgccgtgatctgcaatataatctaacggcaatgtatttacacccgttgcaaaccatgcaatccattttaaattcgggcaacgtcgtaaaaatgcctcattgataccgccatcataaccaactaatatatctaaatcagccaagtcgctctcaggtatttctgatgcttttttataaaatttaaaatctaaatctgaaaagcgttgttgtaattcagtttcaacttcacgcatacgatttaacccaacaactttcatatatgtcaccccaaaatgtttttaagttcttctatttgtgttttaaccttaaccttctcgataacatctaatactttaccttgttcatctattataaaagtcgttcttacaatgcccatactttctttgccaaatgatttttttaactgatatacgccagtttctttagctaatttaaaatcttcatctactaataaatcgaaattcaatccgtgtttctcaataaaattttggtgttttttctttgaatcaccgcttataccatatactgcaacatctaaatcattgaacatttctaaattgtctctaaagtcacaagcttctgtggtacaagtaggtgtattatctctaggataaaaatatataatcgcctttttaccttttaatgtatcatttgtaatgacagttccgtcttgattttctaatttaaatattggaaattgttctcctttttgcaacatataatcacctttttcttcattataataattttatgatacgatattagatgaaaatattaaattaaaagaggttgatataaatgaattttagtgaaagtgaacgtttacaacaactttcaaacgaatatattctaggcggtgtcaattccccttctcgttcttataaagctgtaggaggcggtgcacctgttgttatgaaagaaggacacggtgcatatttatatgatgtcgatggcaataaatttattgattaccttcaagcatacggtccaattattacggggcatgcacatcctcatattactaaagcaattcaagaacaagctgctaaaggtgttttatttggtacaccgactgaattagaaattgaattcagcaaaaaattacgtgatgcaattccatctcttgagaaaattcgctttgtaaattctggaacagaagcagtcatgacaacaattcgtgttgcacgtgcatatactaaaagaaataaaattataaaatttgctggatcttatcatggccattctgatttagtattggttgcagcaggtagcggcccatctcagctcggttctccagactcagctggtgttccagaaagcgtcgcacgtgaagtcattactgtacctttcaatgatattaacgcctataaagaagcaattgaattttggggtgatgaaattgccgcagtattagtagaaccaattgttggtaactttggaatggtaatgcctcaacctggatttttagaagaggttaatgaaatttcacataacaatgggaccctagtgatttatgatgaagtaattactgcattccgtttccattacggtgccgctcaagatttattaggtgttatccctgatttaactgcatttggtaaaattgttggcggtggtttaccaattggaggctatggtggacgtcaagatattatggaacaagtagcacctctaggacctgcatatcaagctggtacaatggctggtaacccgttatctatgaaagcaggtattgcattactcgaagtactagaacaagacggtgtttatgaaaaattagacagcttaggccaacaactagaagaaggtttacttaaattaatcgaaaaacataatatcacagctacaattaatcgtatttatggatctttaacattgtactttacagatgaaaaagtcacacattatgatcaagttgaacattctgacggcgaagcgttcggtaaatttttcaaattaatgttaaatcaaggtatcaatttagcaccttctaagtttgaagcttggttcttaacaactgaacatacagaagaagatattaaacaaactttaaaagctgcagactatgcttttagtcaaatgaaataacttttaaggaagtatatttttaattgaattaaaataaagcaaatgctcacatagtagattcattttatatcgttaactattaacgtttaacttgatatgtcactatgtgagtttttattttacaaatttatactattttaatctctgactaaagttttacatcgctatcagtattatgtatgatttattttaacaactataaataagcttgaattttgtaactagtaagtgtataacagtaatgaatacgaatattagatattcaataaacttaaaaggggcgtcattatttttgagactaggagctcggatttttaaaactggtatagccattattttagctatgtctatcgcttctttactaccggatgatgttggtctgaaagccttagctggtgtcagtgctgttgttgcaatgcaacctagtatttatcgttcatttaaaacagtttctgatcaagcattgggtaacattataggtgccatactatctgttacaatggtaacaatttttagtgataattttatcattatgggtgttaccgtcatagtacttattgctattttatttaaatttaatttagcacatgttgctactttggcgagtgtaacagcattaatcattatgggacaacataccggttctttctatattaccgccttttacaggtttgtacttgtaatgattggtgtcataagttcatctctagttaactttgtgtttctaccacctaaatttgaaacaaaaatttactataattcattaaatatatcctcagatatttttatgtggtttaaattagtattaaatgatacgacggagtttaataatattaaacaagatagtcataatttaaaacaacgtgtcgaaaagttagagaaaatttatgattactatagcgaagaacgtcctattacaaaaaaacatattcaccaacagaatagaaagaaaatacttttcagagaagtagttcagacgactagacaagcttatgaagtattaaacaaattgtcgcgttatcaaaacgacttatatttacttaataacaatttcctattacaaatcaaattagatttagattcattaactgcttttcacgagcaaattttagctagcctttctaaaaaagcacgttataatgtgacacatgttgattatgagttagataatccgcagaaaaaagatttattgtccacatttcagcatgagttaataaatcatccttatcaaacggaatattcgtttgccaatgttatgcaaattgttgcagccatcgaagagtatcgacaccatttagagcatttagaccgcataagaattagctttttcacatatcatagatctgatgcagacattgaaattgttgaagaagactttgatttataacattaaaacaattttatcaattaatgccacaatgagataaactaatattgaatctcgaaattaaatttaaaaaagcagtaagattattttcaattaagaaaatctcttactgctttttctatgttatgaccccaccatcctgttacaaattttctcttcaagattgtactgaagtcaaacaactaatactttataagttttgaatgctatataaatgctcgtaagcaccttgttttgcaatcaattcacgatgcgtacctgtttcaacaatatgtccattttcaattacgacaattttgtcagcatgtgtaatagtggacaagcgatgcgctacgataagtgtcgttcgatctttactcaacacatctaatgcttcttgaataatggattcactttctaaatcaagtgcacttgttgcttcatccaagataagaattggcggattatttaaaaatattctagcaatcgataatctttgtttttgaccacctgataatttaacacctcgttcacctacttcagtgtcatatccctgtggcaagttcataataaagtcatgtgcattagccattttcgccgcttcaactacttcttcatctgttgctgttggacgaccaagtaaaatattttccttaactgtatcagagaataaaatattatcctgttgcaccaatcctatttgatttcttaaacttcccgttaaaaaatctttaatgttgtgaccatctattaaaatttgcccagaagttacatcgtaaaatctcggtattaagttaattaatgttgatttaccaccaccactcatacctacgaaagcaactgtttctcctttttcaatactcaaattaatatcttttaaaattggagcttcgttatcgttatattgaaaactaacatgatcaatatcaatacgaccttgtttaatttcaataggttgagcaccaacaccatttttgatgtcataatcttcatcaattaattggaatacacggtccattgaagcaaaactttgcgttaaagttgtaaatgatgcgactaaacgacgtaaaggcccgaacaataactctaagtatccaacaaatgctgcaagtgtacctactgtgattgatccagaaatagcaagatatgcaccaacaccgatgacaataattggtccaatatctgtaactgtattaattgcggcaaaggaataggcattccatcttgtatgtttcaacgcacgtgttaggaaattagtattctttttatcaaagtttttcgcttcattgtcttcaatcgcaaaacttttaacgactgaaataccttgaacacgttcatgcaagaatccttgaacctcagctaatgcttgagatctttcacgtgtcaattttcttaatcttccaaagaaaacgtacaccgttaaaatgtaaaatgggaagataaacagtgctgctaaagtcaatttcacatctaaaaagaacattatggatagtgcaataataattgttatacaatctaaccaaatattcattaacccggttaaaatgaaatcttttgtttgttcaacatcattaatcactctagatattacttgacctacttgattattagcataaaatctcgcacttaaagcttgtaaatggttgtataactttttacgtatatcatacaatattttattacttgtccattgcgccaaatattgacgtataaattcaattggtggtctcactattacaaaaataaataatgcgataccaatggcaatagttaaatgatgaactttttcatcagtcgttagtgcgtggttattaatcacgccatctattgcatatttaattaatagtggtataagcattggtataccaaacttaattatcccaacaataatcgttgcaaaaatacgatatttgtatggcttaacaaattgcaaatatcgtttaatcatacaatcccccctaatctattgccctatcctattcataagcataaaaatgaatagaggttggatacataatttgtagatgtaaattcttcttacaatttacatttttaaaattaagatatctcaacctctgtcatattcatgtgattaaatacgttgtcttattcgtatgttatattctattcaatttaatctatggatactgtgtccccacacgacagcaaaagttatcatacttctttacatcactaagtcaatataaatgatttaatcagtatttacactttatttgcttaatactgtctaatttttttgtaacgttctttccaaactttgataaaatctggcgcgaatgggcccttcttctgttctatccattgttgaagaatgtccacgttgcgtcttaaaataatatcaatatcatgcggataattcatttgattcatatgttgctcatgttcatcttcatctaataaatgatactttccgtttggatatactttaatatctaaatcatagtctatatattttaatgcctcttcatcacaaacaaatggtgatgacaaattgcaatagtaataaattccatcttctctaaacatgcagataacattaaaccaatattctgagtgaaagtaaacaattgccggttcacgtgttatccaagttcttccgtcactttcagtcactaacgtatgatcatttccaccaatgacaacatgatcagtaccctttaatattgttgtttcagaccaaacgcgatgaatcttaccatcatgtttataactctgaattttaatgttttccccttctttaggtatggattctctgaccatactccacaccaccttctgttaatttaaccattataaattatagcatatttcagaaatagtattatataaatacatatttttacgaaataagattttactacttaataattaaactcggtaatattgctaagtactacaacagagatttacatgtcccatttaaagtatataaaatcatcacttttatatatcaacactttaactttttgacattgttattctatgagatttaaagatatcatttatactttttaaaattaatgtcactatgttttccgataatattaccaatcatcgaatgttacccatttataaattgataaatctttgacataggtacagggaatgtatattgatctcgatcacttaaatcaaaccaaatcatgtcatctggtaatgtttcaatgttaattgctcctgaaacggcgtatactttaatcttccatgttaaatgagtaaattgatgcttcaactcaaaaataggtgtttctactggttgaatgtcatgaccgattttttcagtcattttacgtctagcatgctcactttcaaacataggaaattgccacataccatgcaataatttttcgctacgcttttgcaacagatattgaccttgattatttctaattaaaaagacggattgctcaattacttttttacttacatttttagatttaacaggtaacttttcaaatgtacctttatcaaatgcctcacagttttcttgaactggacaaaataagcataatggattttttggtgtacaaattaacgcccctaattccatcatagcttgattaaacgttccagcttctgtagtaacatacggtaataattcttgttcgtacgatttcctcgtcgattgtaatttaatatctcgatagtcatcattcaatctagaccatactcgaaaaacatttccgtctacagttgctagtggtacattatatgcaatgctcattactgcagcttgtgtgtatgggccaacaccttttaacgctttaaattgatcaggatctttgggaactaagccttcatatttatcatgaacttctttaatcgccgtatgaaaatttcgagctctactataatatcctaagccttcccaatactttaacacttcatcttccgaagcttgactcaaaacttccacagttggaaatcgttcaacaaaacgatgataatagtcaataactgttttaacttgtgtctgttgtaacatgacctcacttaaccaaatatagtacggattggtcgtttgtcgccatggcatttctctttgattttcatcaaaccagtgtatcaaattttctttaaaactagactgctgatacatttataaaaccctttcctcaccaaaattaattgtctttactcataatgtttttattgtacattaaaatcatggttagtatgtaagttaatttagttatttgcgaaattggattataatagtatatataatattatgaaatgagtgaactgatatggacactgcaacacatatcgcaattggggtgggccttacagcacttgcaactcaagatccagcaatggcttctacgtttggtgcaacagctacaacccttatcgttggttcattaattcctgatggggatactgttcttaaattaaaggacaatgcaacatatatttcgcatcatagaggtatcacgcattccatccctttcacaatactatggccaattttaattacatttttaatattcacgttctttagtggaaccaacccatttcatgtatggatgtgggctcagctcgcagtatttttacatgtctttgtagatatattcaattcttatggtacacaagcgcttagacctatcacaaacaaatggattcaattaagtgtgattaacacatttgaccctattattttcacagttctttgtattggtattgtattatgggttataggcttgcatccatttgcagtcttctttcctataatcgctttactaatcatttattacatgattcgttttaaaatgagagccgtaattaagcaacaagctttaaaagcaattcaacaagagcatcaccctgttaaagtatttgttgcgccaacaataaaatttatggaatggcgtgtcgcgatacaaactgatgcacatgactatgttggaaaagcatatggtaggaatgtggtgtttagtgataaagtggaacgtcaaacattatcaacagactccattttatggaaagtcaaaggtaataaagatatacgtacttttttaaacttttcatcaatctatcgttggcaaacaacaacgttagcagatggttctactgaaattcgtttgattgatttgcgttatttaaaaaatgatcattattcatttgtggcaattgcacatgtaacaaacgataatgtcatagaccactcttatattggctgggtatttacagaagataagttacaacgtaaactgtatgctaaataatttcaagttattattcactaaagttaatctataaaaaatgaacaaccgggcagaatgaaaatcaaaacgatttttactctgtccggttttttaatgtaaaactatgaatgcttttacaaaatctaaaatttatattgttgctaacaaactacctttaatgactcgaaatatcaaaatcagtataggaaaacaatatctagatgatattctaattgtttctgattctcacagattaatttacacaacaggtcagctaaacatcatgaagaagtatccgcctcgtctgtactatcatttgaaacatcctgttgattatcagtttgtgtcactttagatgttttattataaattgcgtgtgtcgtataccttgctaatacgaaatttactgcagctattaaacataagaataaaataaagtaaaaatgatatggaatgttttccatacttgatataccaaatatgatagattgtgctataccattaacaatgtaatacattggatttagcattaggatgtgattgataaatacatgatttggatttggtatgaaaataattggtaacaataagaaacacaatacacaaaccccataaaatatgatatttattttttcagttaacagtcgaataagaccaaaagtaacggatattaatcctacaaaaatagttgccatcacaataaaatagaatagcgctatatatgatgtttcgaagtttactggtttaaccaatgcactaatcatcgtcaaaatgactagcataataaaacttaaaatagacataataactactggcgtcgctgcggaaatattaaataacttagtaactaaaaagtcattcatataatgatgataagagatataaattgtgaacatcactaccgcaaaaacaatcaatacaatgattctaaataaccatctcacctctttaacatcggtcaaatgactaaaggaaaatagcgtttcacttgcaataataagtattaaacatgcagctaatacgattagaaaacttttccaactttgttttaaacgttctgttacataccttttagtatgcggtaagtttttaaaatataaaataatattatctagcatctttacacctacaattcaatataaatccatttgtcttctttcaaattggcaatacaatatccattcccaactttagtaatccaaatgttattgttaatattaaacttatcttttaattcttttttatctacaattggataaacaaaaccgtataactgattattatcattgaaaagtaattgtatcggttgttgtgtaacggatgcaacgaaacggttatcatcatcaggaactaaagtttttataactgaactatgctttttatgtaattgactattaaagtatgcatagtaattactataatttgatttcatatatggtgctaattttttaaaactatgcgtttgatataaacctgccgggttaaaatattctaatttatctttactaacatagtaagtcttattatcggcggtaacacgataatttttactattttcgccagtaattgtaactacactatattttggaattgtgacttgtttatccccttgcatatccacactgccattaaaagcaattccataagctaacttttcgccatatggatctttattttcattttgcatcgtagcacgattcgtaaaatctgttatcgaaataattcctatattattgaaaatgagcaacatcatcaatgctaagcctaaaatagtacctgaggctaaagtccaaaaacgcactaaaaacttaggcggttttgcatgattatagcgctcaacacgtttgaaattataggtcatctctggtattcttgtacgattctttttccaatctaaatcaaagttttcaatttcttcttttgagtttagacttaatcgatcacgttcatgttctttaaaagatggaataacttgtttaagtgacccttccattcttaattgaccatgtgaaaaccaagctatgtagttactcacttgtgaaattttatcaatatcatcaccaattgacacaatcgttaaattattttcaatataatcatttgttaattcaatcgcacgttccataaattgtggtgttaaatagtcaataacatgatttaaaataataatatttgattttgatgagcgtgcaatacttaatagtaattgagcgtatgccgctttcgaaatatggttaaccggcttcgttttataatcacctaaatgtgcatattgaataatctgttcagctttatgatcattaatttcatatggaaatagttgaactaactgcgctgtataagcttcaacagtttgatgaattaacgattgatcttcaatatatccgtagaacaaatcttcagtacaaactactttacctttatcaggtttaattgcacctgccaacaattgacctaccaacgctttggaagattcaggttcaccaattatacctaatgcttctccttgataaatatgtaaactaatattgtttaaatcgatatcttcagcatcatatccaaaaggtaaataccatttcttattctgtttattcctatagtagtgtgttacttttagtaactttaaaacaattgaacttcccatctattttcatccttctataattgtaataacgctataggtaatccttcttcgggttcatcgctattaaatctaaacccccacgcaaaaataccttttaatctttctactttaaaatattgattactgccatcagtcagtttataaattttaccaatttctatcttttttctgtctactaagtaactttcggcaacaattactttactttgataaacgtcatattcatttaaaataccattcatctcagcttttctcattttctctttataaagttgtatttcgtgtcttaattctggctcagacatctcactcaatttcttctgttccatcggcaataccactttcttctaatttagctttaattttatcatatttatatccttttctcataaggccttcgatagtttttgaaattaatttctgttgcgtgtacttctttcgatttttattataaattttttctaaatctcgttgtaataaatcgtctaaaaccgcttcatcttgtgtaaaatccatttcattcaatacagcatgaatggtttccatttcaaaccctttttgaattaaagattgcattactttttctttaactttattttgtggccctttttttgttttagatattttttcagcaatttggataatatcatcaagttcctgttgttctctataaagttctgtaaatatttcaatgatatttggttctataccaagttgatatagtttttgttgataaattttaggtcctttatctgtcgtgcgaatcattgtattttttaaactttccgcataatcttgatggtcgattaacttttcgcgataacaatattcaatcacttcagaaatcgcttgctctgatatctcttctttttgtaaatattgtataacttctttttcagttctctttttatatgataaatattggattgctttatttaaacctatgcgataatgatcatacttttgaatctctgccatgtcagcagcttcaagttgttgccctttttttaaattaaatttgactaatgtatcaatatctatacccatttcaaattgttcgtctaaaaaaagattaaaccgttctttgtttttcttttgaacttctattttagtaatcttcggcactggatcaccccgttactttcttaagttttaatacaatactcttttattattcaataagccacttcctatagcaaatgtttaactttaaatatttttcgatgctaacaaaaaatcacactatcatcttttaaaatgaaagtgtgattacaagcaaatctgtaaaatttataaagcagaaacaattcaactttatcattatgacatttcaattaaaccttctacattatagttccaagcatcttacacatgaatgcaagtatttaacgatttaattgtgacatagcctgttgatattgtgtttcattgatataattttgttgcttcattttttctaagttcgtgcttacacgttgcgtaaaattctctgacatattattgatattatatacgctaggtgcattgactttactagctaaaatagcgctttgtaaaactgttatgtgagacattgttgtactatttttattcacggttgttccaaagtaatggtttgctgcgccctcaagcgtatattgattatccccaaagtaaatattatttaaataaaagcttaaaatttcgttcttattatattgtttttcaactcgatgagctacaaataattcttttacttttctagtaaatgaacgatcattatcataaaaataatttttgacaacttgttgtgtaatggtactaccaccttgcacatctctgtcgctaatcgttgaaaataaagctctagttgtacctttcaaatcgaatccatgatgattgtagaatcgttcatcttccattgaaataaaggcacctttaacatactctggcatgttatcagctgacacaaaactacttttattttcaatttttcttagttcatccacattatcgcgtgtagataaaaaatacatgataccaataaacaatgcgataatgattagaatggttaataatatttttaatagtattcgtttactttttttctttttcggcggtttgccaactggttgataatacgtattatagtgaggttcgtgtttcatatgctcaaaatgttcatttgagtttgagtacctatcgcttcttttcatgcgtttgctccttcttttaaaactcacttagtatataccttgagtttaccagtactatcacaaataggctacactttttgggaaaatcagtccaagggcttacaatcgtatacgccatcatacttacttttttgttttttgaaaaaattatagataaatcattgcaattttaaatattaatcatgtcaaatattgttatattttataaaaataaaagaccatccctattaaatgccaatagagacgaccttttatttgttattcatttattaaaactaaaatccatatttcatttcaaacgaaaatatataaattttaacaatcgataaccacaatacttctattgtaattgtttaacgatttctcgattaaaatcatctaaatcgtctggtactcgacttgttacaatattgttgtctacaactactgactcatcaactacatgtgcgcctgcatttgataaatctttgcgtacatttaatactgctgttaacgtacgaccttttaaatcgtctgtatctattagtatttgtggcccatgacaaatggcaaatgttggtacatcatttttagtaaagtatttagcaaatgtgccatatcgaccttctgtatctccacgtaaatgatctggtgaaaatcctccaggaattaataatgcatcataatcttctggtttagcttctgcaatgcctacatcgacagtaactttttcaccgtgtttaccaacaacttcactatttgcagtatctccaatcactacagtattaaagcctgcattctctaatgcctctttagggcttgaatattctatatcttcaaattcgtttgctagaataattgctacttttttagtcattgaaaatcacctttctatatatcattgatataattactatagacaagtaaatcagtgattaaacatacaagatataaaaaatattaagcgactgtcgcgatatctaaccctaacacatcttatgtggcatttacttagatactaatttaaccttttcttcaagctgatctaacaatccaatccattcatctatatcttcaacacgtacttcatcaggatttacatgatcgatatcctcaataaacttatttaaacgcgcttttatctgttcgattgtttgctgttcattcataaaaagttaactccttttattttgttttctttttcattattatcctaacagaaattgcgttaaagcgatataatcttagctatatttatgacattcaaattattttgacttttaaaaatccccttttcaattaactaaaattaagagataatttgttacgagtgataatacgaagtggtatcataccgatatgaaccaaatagaaagaaggaagtttaagacgatgaatagcgtcaaattgaagcaacctgttagcatttacaatgatccatgggaagcatataacgatgttaaagaacatggccaattaactttaagtaacatcgaatttacaactacaaatctttgtaatatgcgttgtagccactgtgcagttggttatactttacaaactgtcgaccccgagcctttagatatggacttaatttatcgtagacttgatgaaattccaaatctgcgaacgatgtctattacaggtggcgaaccaatgttttctaaaaagtctattagaaatgttgttaaacctctattaaagtatgcacatcatcgaggtatatatacacaaatgaattcaaacctaacattgcctcaagatcgttatttagatattgctgaatatatcgatgttatgcatatctcacacaactggggaacaactgatgaattcgcaaatgttggctttggcgcaatgaagaagcaaccaccgttaaaagctaagttaaaattatatgaacaaatgatttcgaatgcacgtacattatcagaacaaggaatgtttgtatctgcggaaacaatgctcaatcaaagtacgctaccacatttacgaaaaatacatcaagaagtcgttcatgatatgaaatgtagcagacacgagattcaccctatgtatccagctgactttgcaagtcaattaaatgtgttaactctagcggaaatgaaaaagacaattcatgatatattggatttcagagatgaagatatttggatgttatttggtactttgcctgtgtttccatgcttaaaggatgatgaagatcaaaagttactatcacgtttaagaaatgctaaaaatgtaacgactagaaatgacccggatggccgtagtcgtttaaatgtcaatgtatttacaggtaatgtaatcgtaactgatttcggagatgaaacaggtacaatttcgaatatacaaaaagataaattaacagatgtatttgataaatggttatcctctgatcttgctaaatcattaaattgtcattgttccgagtttagttgtttagggccaaatgttcttgttaaaaatatgtactatccgaatatggattttaaagataatgagcgtcatatgcacaaacaaccacaaattatacaattttaaaaactcttaattatgcggagaagcactttatcgataagtagtctccgcatattttaatgctattataaaataaaaaacaattaattgctggcagtactctacttaaataataaagggcatttaataggactaatagtctataataaaaggggtaaattttaactaaaagcataaacgtgcataatcaaaaagacagattgtaggtggaatattcgaacataacagttcaattcatccttaacaatctgtctttatatttttagtctctaatatgttgcacttgagctaaatattcaattgtttgtttactttcaatgcgacgtgcttttcttcgttcaacacgttgtggtgctgtatcataaaaccatttttcaacatcatcttctggatatacaccaggtacatgtttaggtttgccttcatcatctaacgcaacaaatgttaagtaacttaatgcagctaaatcatgcttgttattaaatacatcgtcaattctaatttgaacgaccacttccattgaactagtcccagcgtatgaaaccatcgctacgtattgtaatatgtcccctgttttaatcggctttaagaaatctactgagtctgtagatgcggtaactacttgcgcaccagcatgtttcatagctgtgattgctgcaatttcatcaatattagccatcaatgtaccaccaaacattgtatgatggtgattcgtatcttgagggaaaacttgtctatttttataacattttgattctgacatagatttcattggtctgtcctgatttgtcattattttatctcccaatctatactttaatcacgtatttgacctttaaatacatgtttcatttcctactcagcacctcaaaataacatttattaaaatgttgatgcccaatttccattttcaaatactagttcttttgaaccatcttcgaatatgccataaatagtcaaatcactactaccaatcatgaaatcgacatgtacatttgaatcatttaatccgcttgcaatcttttcctcaacagtcatttccgttccaccttgaatattaaaggcgtaagcagatccaatcgctaaatgacatgctgcattttcatcaaataaagtattgtaaaaaatggtattacgatttgatatcggtgaatcatcaggtactaatgctacttcacctaatcttcttgaaccttcatcagtattgattaaatctttcaataccgcttcaccttttccagctgaaaaatcaataatctctccatctttaaacatcaatttaaattgatcgataattgtgccattataacttaaaggcaatttattagtaacatatccatctactctatttcgatctggtgctgtaaatacttcttcagttggtatattagcaataaaagcttgttccttgccgttaacataacttgtagcatcttcccagatatgatttttcgctaaacctactgttaaatcagtaccttcagatacataatgcaacgcatggtaatttttttgttgtaacttttgagcgtaaacacttaaattagcgatgtgttgacgccaattttcaactggatcgttaccatcaattcgcacaatatcgaatacctcgtcaataaacttaatatatgcttcttctacagatagttcaggatacactctcttcgcccaagctttagatggaaaagcagctacgacccatggaaattgatttttttgtacactttccatatatcctttaaatgcgcgtgcgttttgttgttgaaatgcttgtaatttttggctatcgataccatccattaaatcaggatcttcactaataagtgctaaattagcagcgccacgtttaacgtaatccattctcgcttcaacatcatatgattttatctcatgattagcaaaatgttccacagattcattttcaaattttaagcgttttaaggttggatcgctatatacaacacgtacatctgaagcgccacaatgatatgcttcttctacaattaaatgcgttaattctaatgtttctactgatgatctaataaatactggctgttttggttgaacattcataccaaccttaactaatagttcagcgtattgttgtaacttttctttgtaattagtcaaaattcccactcctattcgtgtcgcaattgtcctaaagcgtcagcaatagctgtcacttcacttggcgacaatctttctcttgattgaacaaaatcatatatatctgttaattcttcttcatttgcatttttatatttttcaggatctaataatccttgattaacaatatttaacttctctctaatagctaatactttctcttcatttgtcatagccacaatgttcacctctaataatagttatgttatcaaagtatcacaatttaataaactttaatagaattttatataatctgctttcttattgtttaaagtcgctataaaatggggatataactacatagtttggaggaatcaaaatggtagatgtagcatttgtctgtcttggcaatatatgtcgttctccaatggcagaagcaatcatgcgacaaagacttaaagacagaaatattcatgatattaaagtacattcaagaggtactggtagctggaatttaggagagccacctcatgaaggtacacaaaaaattctcaacaaacacaatattccatttgatggcatgattagtgaattattcgaagcgacagatgattttgattacattgtggctatggatcaaagtaacgttgataatattaaatctatcaatcctaatcttaagggacaattgttcaaactgttagaatttagtaatatggaagagagtgatgtaccagatccatactacacgaataattttgaaggtgtatacgacatggtattatcatcttgtgataatttaatagactacatcgtaaaagatgcaaatttgaaagaggggtagttttttatggaaaataaatttgttcctggtattttaattggtgccgtaattggtggtgcaattagtttagctgataaatctacacgtcaagctttagttcaatcagttaaagatgcaaaaaatggtaaccgcactcgtaagccttctaaagtcagcaagattaaagacgaagttttatactggaaagatgttgttgaagaaattcgtcgtaataatcctgaattagaacgttcattaaaggatgcgaaagaaacatttgttaatagaaaaaatcaacgctaagatgattttgtttttataaggcaatacttaacaatttggtgtacgcctttcatagttatcattattaaatgataatacaatgattggccaaactgcattgtttcagtattgcctttgttttaattttaaatcaaaatagcctatgaaagatttaaatcaattaatttctataatattatcatttttaaagcatatcattgtttagtttttttataattggataaatactaatagttactttataaaacattacatagagaaaggttaaggagtgcacatgtcgaaaaaggatcactcttcttcaaaataccttaattctgttaaggaagcgcaagaggagtcaaaaaagaaaaataaaagtaatcccaaaattgatgttgatcgtacatatattgaacctcaacaattccaatctaagaaacctaaaaaagatgatcaggttttcttcttatcaagattaaataaacctgcaaaatataagaaagactctaatttcttatcatatctcatctatcgcataggaaaagatgatgcctcaggactagcagcacaaatgacttaccatttcgtacttgctatgttccctatgttgcttttcctattaacattattaccatttttcaatattaagcagagtcaaattactaatatgttaagcaatgcacccgctgaaacatctactctaattaagagtgtaattggtgatataactcaaaactccagtggtggcttattatctatcggtttgattttagcaatttggtcagcttcaaatggaatgactgcaattatgaattctttcaatgttgcttacgatgtagaagatagccgtaatggaatcgtattaaaactactaagtgttgtcttcactgtagttatgggcgttgtgtttgtagttgctctagcattaccaacgcttggttctgtaattagtcatttcctattcggtccacttggatttgacgaacaagtgaaatggatttttaaccttattagaattgtgttaccaatcattattatatttatcatatttatcgtgttatattcggttgcacctaacgttaaaacgaagcttaagtcagtattaccaggtgcagtatttacttcaattatttggttagctggttcatttggttttggttggtatatttcaaattttggtaactattctaaaacatatggcagtatcgcgggtatcatcattttgttactatggttatatatcacaagttttattataattgtcggtgctgaaatcaatgcaatcattcatcagcgtagtgtaattaaaggtaaaacacctgaagaagcagcattagaacatgatgacaataataaaaatcattataatgagaacactagatacgaatatgatgaagatagtaatgcaacacatcaacgtacgtatcatgttgatgaacatcctagtgatacctatccagaagatgataaaaatataaaagacaaaatcgttgataagcttaaaaaagactaaacaccaacaaaacagaggttttcgctaatgattattgcgaaaacctctgttttttggtgtctatttgatgttatattgtgattggcgtaagtaacttttcttaattcgatatgaactattgaattaaattatgttggaatgcatagataacagcttgtgttctatcttgcacttctaacttacttaaaatgttactcacatgtgtcttaaccgttttaatagtaatatgcgatgcactagcaatttcttgatttgagtaacctttcgcaatcaataataatatttccatttctcgttctgtaagcatttcatataactctgcgcgctttttcatacggttacgcattttcactaaaacttccggttcaaaaacagattctcctctagaagttttacgaactgcatcggcgatatcttttgcacttgttgtttttaaaatgtaactatcgacacctgcatctaatgcacgatatacctctttatcttcaataaaactagttaacattaatactttaatttgcggtaaatcttttttaatctgagtcgtcgcttctacaccatccatgtcatccataagtaaatccattaaaattaaatctggcttcaactcatgggctttggcaattgcttctttaccagaagcgccttcaccaactacttcaatatcactttgcgttgatagataacttgaaattcctatacgtaccatttcatgatcatccacaaacaatactttaatcgtcatacgaatcctccttatttaaaggtgctttcacctcgatacgtgtacctgaatctggcaatgatacaatatggaacgttgcaccaatttccaaagctctttcacgcatatttttaagtccataactttgttctaatttttcatcaacattaaaacctttaccattatcttgaattctcaacaataaataatcgtctttattaaacaattctactgtcacttttgtaccgtttgaatgacgcaatgtattcgaaattgcttcctgtgtaattctgaacaaatgatcttcaatacctttaggcactttaaaaccttgtatttcatgcacaactttcattggcacttttttttgtaaatcaataactaaatctttaataccctcacctaaagatttgtcttttaaaccaagcggtcttaaatgtaacagcaaagcacgcatttctaactgcgaatcttgaaccattttctctaaaataggaatttgttggtctaatggtggttctaacttcgtttctttgatagcagatagcatcatacttgccgcaaaaagttgctgactaacagaatcgtgaagttctcgtgctagtctttgacgttcatcttcaataatctttttaactttcacatcattaatattataattttcattggttaagttttgagttttaagtcgcaacttatgcaattcttgatttgaaggtacgagtgtatggtataaatctaacgtttcactatatatttctatattttgatcattaatgccaactgtttcgccttccattgaacgctcaatttgcgtcttaatccaatcattttgctgattgattttgtaagcgagtaccgaaccaacaataatacacaataatatgatgatgagatttaaaaataaaaaaactggtattccgaatatttgtgtataaaacataccttgaaaatagatgatatttacaaaaactttatcgatgaacagaaatgcagctagcatgctatatactaagatgagcattgaaccaattgttctaatgtagtggttcatcgataaatcacctctacgtctccgataaacgttgatacgtagatattaactgtatagttatccggtttcatcatttcttcaatatgaatattgttattttcaactttatatgatttttcattcacgtaagtacttccataaaaagcagctacatgtaaattaatattgtaattaaccggcaatataacctgcactttacctaaaatgtgtctaacaacaatggtattattttccttaatatttgcagcttttgttaagtcaatatgtaggtcgccaattccatgttgaatttgtacatcttcccacttatatacataaactggtgtacgttgctcaccaaaccacttttgtttaataaaagatggtgaagtcataacctcatccgtcgcaactactttttttggtttaaacttgtgtattaaataacgcacaataagtaataataaaaagacgaacaagatgatgattgtatacttattagacaataatgtgaatgcaattaatagcgcgcctatccaaaacgccaaaaggccacgtattttatgaaaataaagatatcctacataaactaatacacatcccaataatagaacgagtaaaaagccaattttttcaaaaaatatgtagtaaaaattggcaataatcattaatgcagtaaaaatgatcaacatttgcgttgatatatatttgtgtgtcatgtttcgccgcctttctatgccacagcgttcatataatttattagatacgatgttttttctgttgctattttttcagttgaagtttgttgaatttgagtttcaatttgtgcataatatgcttcaactttattcaactctgatttaatattttcaatttcttgattattgatttctcttgcacattgaatttgaaatgcttcagcaatatcaatatatttattttctaatgttagcattagactgtcaattaacttgctaagttgttcttttttagtaattaaataacgcatataatcatctaaatttttcattttttcatctagcattaaaaggtagtgcttgatattatttcttactgttgctctcaaaaactgttcaatataacgttcaacatagttcataactatcaccttttataataagttttaaaataccaaatgcgctatgtatcttcgttgatgtcgatgatatgtttgcttaaaaactactttgttacaacatatttttgaaatgacgcattgattgtgttcttaattattataaaacagttccgaaaccaatatgaataggctccggaactaaatgatgttcatactttagtcttagtatatgttgaactattcttcttcaatctttgtcgttaaaatcggaccatccttagtcacgataaccgtatgctcaatttgagcaacaaaacttttatcgctcgtttcaaaagcccattcatttttaccttctgtaacaaatgatgcatttgatgagataaacggttcaatagctaataccataccttcagttaataatgttttgtcttttggatcaaagtaattaagtacatgtgctggtgcttcatgtaatgataaaccaacaccatgacctgttaagtttttaatgactttcaaatcattttgtctagctgtattatgcaccgctttaccaatgttacttaacttagtacccggttttacttttgcaattgcattctcaaatgccatcgttgctacgtcacatactttttgtttcattggatcatctgattctccaacgacaaatgaaatgcctgtatctgcataatagccattcttcaaagccgatacatcaatatttactaaatctccttcacgaatgacacgcttacttggaatcccatgtgccacctcttcattgacactaatacacgtttgaccaggaaaattttcatcatgaattggcgcagaaatagcaccgtattcttcaaataactctttcgcaatattatcaagctctttcgtagtgatacctggtttggttgcagcttgcattgtattgcgcactttagcgcatatgtatccaatttcttttaacgcttgtaattcttcttctgtttttacaatcattttatcccgttccttttttatataattataacttattatagcaaaaattctttgatatactaaagatgttactttagtattttggaaagtgagtgagacatagtgtgataaagaaaaaatatttctttatcgttgtaccccaacttgcattgcctgtagaaattgtagatccaatttctctatgttggggccccgccaacctgcacattatcgtaagctgacttttcgtcagcttctgtgttggggccccgccaacctgcattgcctgtagaatttcttttttgaaattctctatgttggggccccggactataattgaaaaatgcttgttacaagtgcattttatttcagtcaactactaacaatataacattgtggagcccagaactttgattaatgtatatgaaaatcaaagtaatgcttatgtatgattatttcaaatattttacatacatgaacttttccaatgtacgatactattattataaagcgctcgctaagattttacgatgattagaggttaaaaaatgaacgatcaatggtataaacatttaattggtgccagaacaattaaaactggtattgccatttttttaacagctgtcttttgtatggcactagatttaacacccatctatgccattttaacagctgtagtcacaattgaaccaactgccaaggcatcacttattaaaggttatcgtagattacctgctacggtaattggtgcaggctttgcagtattatttacatatttattcggcgatcaatcaccttttacatatgcattgagtgcaacgttcacgattttattctgtacaaaactcaaattgcaagttggtacgaatgtcgctgtactaacatcattagctatgattccaggtattcatgatgcctacatattcaactttttgtctcgaacattgacagcaattattggactcgtgacatcaggtttaattaacttcatggtgtttccacctaagtattatggtcaggtcgaagaaaaattaagtaagacagatgccttgatgtataaattattttacaatcgctgccaagaacttatcttatcaagactgcaatctgataaaagcgaaaaagcatataaaaatattttcaatttaaataatcaagttgaaacgttaataagttatcaacgtgatgaattaagctatcataagaaaaaagaatgtgattggaaattactcaatcaattaactaaacgtgcatatacgaatcgtttgtttatcactcatttatcaaatatcatttacttgcctaaaaatactcgtgttaacttttcaggtgacgaaaaaatggcattgctaaaaattagtagtagcatcaaagatatattttatgatggttcttttaagagagaagatgattctgtagaaactttacgttcgactataaaagcacttgaaattagtggtgaaaatcaaattaaaagtcatatactatacgaagttctaatgatttatcgactgctagacagcagatatgcttaatttaagtaccttatgctaattggcaccatgggagtgggacagaaatgatattttcataaaatttatttcgtcgtcccaccccaactcgctttgcctgtagaatttcttttcgaaattctctgtgttggggcccacaccccaacttgcattgtctgtagaaattgggaatccaatttctctttgttggggcccctgactagaattgaaaaaagcttgttacaagcgcattttcgttcagtcaactactgccaatataacttcgtagagcatagaacattgatttatgtccccgcctctttttatcgtatatagcatgtccctttttaaaattacaagcataaatattcagactcaaatatagccacacgcctaaactacggagggatgtggctgtcttttttgattgtaattacatatcagatttaaatcattaatgtaaagaggctaattcattaataaatttagtaaaatctgatttagcaacatttatccttaatgaaataccagattctgttgccatgtttgaatgccttaaaccagaatcaaaatcaatataaatacaaagcagttcttgattaaaatcaataattgtaaaatgtaaatcaggttctataaaatatatttcagtaacaggattgtcgcaatccatatgtttcaaattgtccatgtcactatcaaagagtgcaaattcaaatttaacttcttgatcttcgaaagttgcactagtgtcgaaataataaattttattatcttcttcgataactacatcttttaaaataaatgttatcgatgttttgctatgtaaataagatgcatcttttaatatcactttagtaggcttcatcgtcaaattcctttcatcattcattttttcatgttgcataatcaccattactattgataattctaggatagatactcattgtataataattattcactagaacaaaaaaacacacatcaatttggttgtttccatccaaaataatgtgtgtgtttatacatatatgattaattactaaacttcatcgtttatcaatattaaatccattgatgcgatgttcagagttaacgagatttcttctgtctatttgctctgtctattaatacttgtttcgcttgtatttccgcttcattatctatttctttaggctcaaacggaatacccttacgttcacaagctttttctaacagataatcagtgatttcgtaatttttaggtaaaattggtccatgtaaataagtacctaataaatttttataatgaatgccttcttttttatcttcatcattattaccataaccaaaagtaacatgaccaagtgtaccgaaatcatgatatgttctaccaccgtgattttcaaaacctacaatagttccaaaagtatcactttcgataacaatatctcctgttaatcggtttgtctttgattcagtataaaaatctaaaatacctaacccttctaattctgtaccatcaggcgtgatatattttttccctaaaaattgatagcctccacaaatcgttaatcccggcataccatcttcaatcgcttctttaagtggtgtcttaattttacttaattcttttgttgctaatgcttgttctctatcacttccaccaccgataaagaaaatatcacattcatcaaaggtaataccttctgtttcattgatttctacgacattaactttaatatttcgttttttagcacgttgtcttaaagcaataatatttcctatatcactgtataaattcaatttatctgacataaaatgataaatagtcaattcatgcatattatgattgacctccttcaaacgaacggtttaattgttcaagcataggcgctaatgatgtatagtttggtattgcaactgtgaaacctttataatccatagtctttgccgttgctttataaatatcacgctcaactataattggtacttcaacctctgctaacttcaatcgcaattgaagttcttctgctcgtgtacctgtcacgatgatagcttcaatttgttgcttagataatttttcaaaatctgcatcataaatccatgaagtatctcgaccatctgcagcgttatcatttagcgaaataacatacactttttcgccttctaattgttcaccaactgataaacttgcattcattcctgcaggatttttagctaaattgatcatcgcttcttttcgttcttttttaaagtactgcatacgaccattgtctgatgtatacgtttcaaagccatttttaattgtttgttcatttaaccctagctctcttaaaacagtatatgctgctaacgcgttataagcgttaaagtcacctgcaattttcatatcatatttttcatcattgatatttaaatataaaaacggtgccacatcaaaacttgatatttcatattttgcttgctctcgtttgaaaccacactgacagtgataatgaccaatttgattataatgaatataatcgtattgcaataagcgaccacagtttggacaatatctactttcattcatcgtactttgttcaaattcatgggcatgtgctttcataccatagtacacaatcgtatcacttgcgattttcaaacgactcacaaatggatcatcagcatttagcaataatttgatgcctttattactaattgtctctgcaatgttattaaccataatatcaatttcaccgaagcgatccatttgatctctaaagaaattagtaaataccatcattgaaggtgtaacttcttttaacacacgtggaatcgaaccttcatcaatttcgattaccgcaattttagtcttaggtgttgattgcatgatgaatgcagaagttatacctgcagccatattagcaccttcattattgtgtataatttgaatattatttgcttttaaagtatgtccaattaagtttgaagtcgttgttttaccatttgttccactgataaatacaatatcatcaacttgctctgctaattttcttaatatatctgtatccacttttctagcgatttgtccaggtaaatctgttcctcttttacctactgctctacttgctttacgcgccaatttcgctagatggattgccgtccactgtctcatgtgtttcctcctcaaatttccactcgcatcattataacatgacaaggcaacttcaaaaaagtttctcaatcacaaattgatacagtgtttctaaattataatcattctcatttagataattaaaaatgatatttattctcaattaaatatcgctaaatgatacattttctcaattagagtgctaaaataaggcattaaattataattattattatttacaattgagaatgagtttgttatactaagtttaattcatagtaattttaatttacaaataagaggtgtatcaaaatgttaagtaaaaatttattagaagcattaaatgatcaaatgaaccatgagtactttgcagcacacgcatatatggcaatggcagcatactgtgataaagaatcgtacgaaggatttgcaaacttcttcattcaacaagctaaagaagaacgtttccatggacaaaagatttataactatattaacgacagaggtgcacatgcagaattcagagcagtttcagcaccaaaaattgacttttcaagcatactagaaactttcaaagacagcttatctcaagaacaagaagtaacaagacgtttctataacttatctgaaatcgctcgtcaagataaagattatgcaactatctcattcttaaactggttcttagatgaacaagtcgaagaagaatcaatgtttgaaactcacatcaattatttaactcgtatcggcgatgacagcaatgcattatatctttacgaaaaagaacttggcgctcgtacattcgacgaagaataattaaacatcactacaatagacagataaatatcatacgacatgataggcatttgggtcacttacaataacccaatgtctatattattttgctttacggagatcactagattcattttctgaatcattgatctgcgttttttcattttcaaggctaattattgtatttttagtcatttattttttaaactactaatgttaataactctaaatttgatgttgaattaatttgacgattttaaagcatatcatcatttactttttaatcagagttacatccaaatgatagatttcacgttataccttcacgtataatattatgtatcgtttgtaagcaaatgactaaaagtctattaatatatacatttaattaattgaaaggattgactacatgatacaagatgcgtttgttgcacttgattttgaaacagcaaatggtaaacgtacaagtatttgttctgtcggaatggttaaagtcattgatagtcaaataacagaaacatttcatactcttgtgaatccgcaagactatttttcacaacaaaatattaaaattcatggcatacaaccagaagatgttgaaaatgcacctacgtttgactacgtatttccatatatgatgcaatttattgcagatttacctgttgtcgcacataacgcggcatttgatatgaacgtcttacatcaaagcattcaaaatattggtttaccaactccaaatttaacttacttttgtagttatcaacttgctaaaagaaccgttgattcgtatcgatacggtttaaaacatatgatggagttttatcaattagattttcatggtcatcatgatgcattgaatgatgccaaagcatgcgcaatgattacttttaggctactgaaaaattatgaaaatttaacatatgtaactaatatttatggtaaaaatctaaaagataaaggctaggactaaataaaatactcccttcaaaagtaagcattgtaaaaatgtaaactttgcagggagctttattttatataaagtcatatatcgtcatatttttataagttgattgttctaaattacctacagtgacaccaataagtcgaattggtacatcagggtcttttaaatcgttataaagtaaatatgcaatattataaatatcttcttcagaactaaccgaatctcttaaactcatctgtttagatagcgtttcaaattgataagttttaattttaaccgttacagttttagctgacttctgtaatttatttagacgttcagctgttttacctgacaattcccatacttttcttaaaatctcttcatcatcattcacgtctgttgcaaatgtgcgttcagtccctactgattttcttactcttgatgatttcacttcactatggtcaataccgcgtgccttgttatataaaccccgacctctttttccaaacaaacgtattaattcaaattccgttttctcatataaatctctaccgttaaaaataccattatcatgcattacttttttggaagctttacctacgcctggaaaatctccaatatccaatgtcatcaaaatatcatggacattttgataatcaatcacagtcataccatcaggtttattcataccactcgctaatttagctaaaaatttgttataagaaacacctgcagatgctgttaaatgtgtctgctctagaatatcttttctaatatactgagcaattttcgaagcaggaaggtctggtctcactaattctgtaatatctaaatacgcttcatccaatgacatcggttctaccttatctgtataacttcggaaaatagacataatctgcgcagatgtttctcggtaagcaccaaaattacttgtgacaaagtatccatttggacataatttatgcgcttgtgacataggcattgctgaatggacgccgtattttcgtgcttcataggatgccgtagagacaacacccctactgcttgctttaccaccaacaatgactggtttccctttcaatttggggttatctctcatttcgacttgtgcaaaaaaatagtccatatctatatgaataattcgtctctcagtcaagtgctcacctccctactaatttttacttttataacgcacaaaaatatctcaacataattatacgctgtgtacgatttttttacataaatcttgcacttagcgataactatattgagataactacaagttgttataaaatcaattgctatttaagcatgatgatgaagacgattgagtaagaaaacataggtaatctgaaataattcaagcaaattcattttgttggtatcatcatattaaaatttattattgagtcggcttttgatgatacaaataaatactatcttcatcttgttgaacatatttaaaactactagatattgttaatgcaacaagcagaatatctataaagcaataagcggtatgcatactaaacataaaaataagtgatgaataaccaaataccttaattaaaataagcaagccagtacttaataggattagtggtgacagcataataattgagaattgccatttgttgaagcaagcatctgctgtttggaataagattctgtctttttttatattaaacataggtttgctatcttttttaaataaaagaaataatgctctatggataagttcatgtaaaatcaataaaataatgaatccagcaaacccatatacaagattgatgatgatattttgatcgacaaccgctgtgacacctaacgcccacttatacgtaaataaaatcacgaataacgcaataacaagttgcaagataataaaccttcgcatttgaaaattatttgtcgttaaatcaattttatgcattaccaaccctcccgatcatgacattcttattcttctttaaatatagtatacaatgtcacatttaatttaaaaagttcatatcaagaaagtaaattggctgtaataaaattttaatatacgacttctttcttcacttattaaggcgaaattttatctcaaatcatgtgcgctatttcaaattgaataatgccactgtctcaacatgtgttgtttgtggaaacatatctaccggtgttacctcttcaagttgatatttttcagctaataataatgcatcacgttgctgtgttgcgggattacatgaaatatagacaatacgcttaggttctaatgtaagcaaagtctgaataaacgtttcgtcacagccctttcttggcggatcaaccattacaacatctggtttaatcccttgtgctttccattgtaaaataacttcttcagctttcccacagacaaaagttgtattattgcattggtttatagtcgcattttgttgtgcgtcttcaattgcagaaggtactacttcaacaccgtatacatgttttgcaagtggtgccatatatagccctattgttccaataccacaataggtatctaatacaacttcattacctgtcaattgcgcatactcaattgctttattatataatttctctgtttgttcagaattaatttggtagaatgactgatcacttattttaaatgtactatctgttaattgatcaataattgtatctttaccatatagcgttatagattgacgtcccataataacattagagtggctatcattaatgttttgtttaatgcttgtcacattaggaaatgcatctaatatcttctcaacaacagcatttttttgtggccactttttaccattagttacaaaaataatcatcatttcgtctgtatgatatcctgttcttacaaccaaatgtctcattaaaccttttttcaattgttcttgataaatacttacatttaaatcttttaaaatagatttaacttcattcatcacttcttgatgttgtgaatcttgtattaaacaactttccatgtcaataatgtcatggcttctttgacgataaaagcccataataacttcattctgttcattcttaccaactggaatctgggacttgtttcgatatctccaaggatctgtcatgccaactgtatcgttaatcttagaattatcaaaatgcgcttttcgctgaaacaaattaatcacttgttcctttttcatttcaagttgtgcttcgtatgataagtgttgaagttggcacccaccacaacgttcataatatatacatggcggtgcaacacgattctcacttctcgtatttatattaagcaacttacctatcgcaaagttcttttttactttgataattttatattcaatttgttcattaattaaagcttgtggtatgaaaataggaaagcgatctatttttacgacaccatggccttcatgcgttaaatcaacaactgttcccgtttttatgtcatttttagctattgcttgcaaaattttacctccaaaatgaacaggttaggaacaaaattatgcgcttcctaacctgccattatatatttcactatttctgtttattcttcgattaaattgtcatcaacatgatcattatttattaactcttcatttacaatatcattaggtgcaaagacatctatatgacgttctagatttaagaaattcgctggtaatttaccaccatattctccatctacatttagttgtaagtctgtgaatgatgaaatattaattgcctttgctttttcataaataactttaggatgcttagtatgttctcctcttgaagctaaagtcataatatgaccaagttctgcaaggtttgatttttcaactataattaacgtaaaatagccgtcatctaacttagcgtccggcactaatttttcaaatcctgccattgaatttgttaaacctaaaaagaataataatgcttctccttggaaaacattaccatcatattcaattcttaaatctacagctttcatttgaggtaacatttcgaaacctttgatgtaataagcaaatggaccaacaatagatttcaatttactcggtgtttcataagagacttgcgtcaattgtccgcctgcagctaaattaataaagtatcgattattcattttaccaatatctactttagtagaatgaccttcaatgatgacatcaagtgcccccatgatgtcattaggtatatgcaatgcacgtccaaagtcattaacagtacccataggaatgacacctagcttaggacgattaggcttttctgcgataccattaactacttcatttaatgttccatcaccacctgcagcgattaatacatcataattttcatgcatagctctttctgcttcaagtgtggcatcacctattttctcggttgcatatgcactcgtttcatatcccgctttttctaattttattaaggcatcaggtaattctcttttaaatagctctttacctgatgtcgggttataaatgattctagcacgtttcctcatatcttatccctctacttaaaattcatatattttaacttcatctttgtttcgtctaatagggagtgggacagaaataatatttaacaaaatttatttcgttctaccccaacttgcattgtctgtagaatttcctttcgaaattctctatgttggggccccaccccaacttgcacattattgtaagctgacagaaagtcagcttctttgtttgggggccccgccaacttgcacattattgtaagctgacagaaaatcagcttctatgttggggccccactagaattgaaaaaagcttgttacaagcgtattttctttcagtcaactacagccaatataacattgtagtgcctaggacattgaatttatgacccaggctcagtcttatttcatcattcttaatatcgttaaagaccaacttgtatcttaaacaaatactatctcaatatgtacaaagcttgttatttattcagcattttttgccgttcttcattatatagacttcgtcagttatgctattttacctttaaaatgatgttgtaaatataatgttgtctttatacaaaaatgttttatacctttttattatacagtttgccttaatataattaaagctaacgcattaataaaattaatatttttaccattaacatgtacaatgaataaagttaaaagtaatttgacttctatagatataaataaaccctcgattgcatctaagtcagcaatcaagggtttattttttaaatcttcatagtttgatgatttaaattatcttttatctaattcttgttttaatagttgatttactaattgtggattagcttgacctttagacgctttcataatttgaccaactaagaagcccatagctttgcctttaccatttttgtaatcttcaactgattgttcgttattgtctaatgcttcatttacaaattttagaagtgttgcttcatcagaaatttgaactaagccattatcttccataatctgtttagcattaccacctttagctgctaactctgggaagactttcttcgcaattttactgctcattgttccgtcttcgataagtttaatcatacctgctaaattttctggtgttaatttagtatctaataattctacttgatttttatttaaatattcgtttacgccacccattaaccagttagatgttaatttaacatctgcaccgtgttcaattgttgattcaaagaaatctgacatttttttagtcaatgttaatacgtgtgcatcgtatgcaggtaaacctaattcatttacatacttagctttacgttcatctggtaattcaggaattgtctgacgaacacgctctttccaagcatcatcaatatataaaggtacaatgtcaggctctgggaagtaacggtaatcatcagaaccttctttaacacgcattaaaattgttttacctgtagattcatcaaatcgacgtgtttcttgtccgatttctccaccatttaacaattcttcttcttggcgtttttcttcatattctaaacctttacgtacatagttaaatgagtttaagtttttcaattcggctttagtaccaaatttttcttgaccatatggacgtaaagagatgttagcatcacaacgtaaagatccctcttccatcttaacgtctgatacaccagtgtattgaataattgaacgcaatttttctaaatatgcatatgcttctttaggtgaacgaatatctggttcagatacgatttcaattagcggtgtaccttgacggttcaagtcaactaatgaatactcacctttatgtgttgacttaccagcatcttcttccatgtgaagacgagtaataccgattcgttttgtttcaccgtcgacttcgatatcgatatatccattttcaccaattggttgatcaaattgagaaatttgatatgcttttggattatctggatagaaatagttcttacggtcaaacttagattctgttgcgatttccatatttagtgccattgcagcacgcattgcccagtctactgcacgcttattaacaactggtaagacacctggatatgctaagtcgataacatttgtatttgagttaggttctgctccaaaatgcgctggtgatggagaaaacatttttgagtccgtttttaactctacgtgaacttcaagtcctataactgtttcaaaatgcatgatttccactccttataatttttcataaacgtcatgtaaattgtattgtgtttcatattgataagcgacacgatataacgttttttcatcgaatggtttaccaatgaactgtaaaccgattggtcggccatttgattgtccacaaggaacagaaataccaggtaatccagctaagtttactggtgttgttaataaatcattggcatacattgttaatggatcatcaatttcttcacctaaattaaacgcagttgtaggcgctgttggaccaactactacatcataattttcgaatactttatcaaagtcatttttaatcaatgttctaactttttgagattttttatagtaagcatcatagtaacctgaacttaatgcaaatgtacctaagaaaatacgacgttttacttctttaccgaaaccttcagatcttgacattttatataattcttctaatgaatgagcttctttagaatgataaccataacgaattccgtcaaaacgagaaaggtttgacgaagcttctgatgatgcaatcacgtaatatgatggaataccaaatttagtatttggcaatgatacttcctcaacgacagcacctaaagattttaaagtttctacagcgttttgaactgcttcttttacgtcatcagctacaccttcacctaagtattctttaggtaatgcaacttttaatcctttaatatctttaccaatttcagatgtaaagtctacatcatcaactggtgcacttgtagagtcattaacatctgcaccagaaatagcttctaatacgattgcattatcttttacatttcgagtcaatggaccaatttggtctaatgaagatgcaaaagcaactaatccaaatcgagatacacgaccgtatgttggtttcataccgacaacgccacaatatgcagccggttgtctaattgaaccacctgtgtctgaacctaagctaaatggtactaagccagctgcaactgctgctgcagatccacctgatgaaccacctggcactgctttatggtcaaatgggttaactgtttttttgaaataagatgtttctgttgaaccacccattgcaaactcatccatatttaatttaccgattaaaacggcattttcattatgtagtttttccattacagtagattcgtaaattggcacaaaaccttctaacattttacttgcacatgttgtttctaatccgtttgtaataatgttatcttttatacccattggaataccaaataatttgccatccatttgatcttttgcttgtaattcatccaattcttgcgcttttttgattgcattttctttatccagcgctagaaaagacttaattgttggatcagtctcttcaattgcatcatatatatctttaacaacatcagatggtttgatttttttgtcttttattaaagttaataaattctcaaccgattcgtagcgaatgctcatcttacgcgtcctcctcattcatgattgtaggcactttaaattgtccatcttctgtttctttggcatttttcaaagctaattcttgtggaatacctttaattgctttatcttcacgtaaaacgttttgtaaatctaaaacgtgatatgtaggttcaacgccttctgtatcagcgctatcattttgttttgcaaaatctaaaatgctttctaatgtgttggccatttcttccgtttcttcaggagaaatttgaagtcttgcaagattcgcgatatgctcaacttcttcacgtgttacttttgtcattaataaaagcctcctttaagtcattcatcactaaattgtatcaaatttccaattaaaaatctaagtatttatgaggtgctactttaatttcatataaactgtataaacattatcattcgtttatcaaatcattttttatgaaaacaacactcttttaatattagacaacccaattcaatattatgattatgcaattttaattataaaaatttgctcatatccaaaaaatacgaaagcgctttctatattggtatgcaagtatttcaaaaagaataaatttaattttcctacttttctaaacatttatctttatgtataatgttttcaagtaactaaattataaattaaataaagggagtgtttatcatgcttacaatggggacagcattaagtcaacaagtagatgccaattggcaaacttatattatgattgccgtctacttcttgatactaatcgttattggcttttacggttacaagcaagcaactggtaacctaagcgagtacatgttaggtggacgtagtattggaccgtatattactgcattatcagctggagcttcagatatgagtggatggatgattatggggctacctggttctgtctatagcactggtctatcagctatgtggattacaatcggtttaacattaggtgcttatataaattactttgttgttgctcctagacttcgtgtttataccgaattagctggagatgcaattacattaccagatttctttaaaaatcgtttaaacgataaaaataatgtgttaaagattatttctggattgattatcgtagtattctttacattatatacacattctggtttcgtatctggtggtaaactatttgaaagtgcttttggattagattatcatttcggtttaatattagttgctttcattgtcattttctatactttctttggtggatatttagctgtatcaattacagatttcttccaaggtgtcattatgttaattgcgatggttatggtccctattgttgctatgatgaatttaaacggctggggaacgtttcatgatgtagcagctatgaaacctacaaatttaaatttatttaaagggttatcatttataggaattatctctctattttcatggggattaggttatttcggtcaacctcatatcattgtaaggtttatgtctattaaatcacacaagatgctacctaaagctagacgtttaggtattagctggatggctgttggtttattaggcgctgtggctgttggtttaacaggtattgcattcgtacctgcttatcatattaaactagaagatcctgagacattattcatcgtgatgagtcaagtactcttccatcctcttgtaggtggtttcttacttgctgcgattctagctgcaattatgagcacgatttcttcacaattacttgtaacatctagttcactaacggaagacttttataaattaattcgtggtgaagaaaaagctaaaacgcaccaaaaagaatttgttatgattggaagattatctgtattagttgtagcaattgttgccatcgcgattgcatggaatccaaacgacacaattctaaacttagtaggtaacgcttgggccggatttggtgcatcgttcagtccacttgtgctatttgcactttactggaaaggtttgacacgtgccggtgctgtaagtggaatggtttcaggtgccttagtcgttatcgtttggattgcatggattaaaccattggcacatatcaacgaaatattcggcttatatgaaattattcctggatttattgtaagtgtaatcgttacatatgttgtaagtaaacttactaaaaaacctggtgcatttgttgaaactgacttaaacaaagttcgtgacatcgttagagaaaaataattcataagtcttaacaaattaaaaaggtactaatgttaatcaaaattatgactaacattggtacctttttattatctttaatttacaattaattactgtaaatatgaacttgcggttctttgtcatcttttgtcttactaattaaagcacgtggttggttaccatctttaatacgaatttcatagttatcgattttatcgaaatatttattcgcttgttcagtaacgtactgtgtaataccaattgtttcagcttgtccatagtaatcgattggtaaatctactactaatcgttgtggctttttatcaacaaatttaactttccctactgcttgtgtgaaattagaaaaatatgattgcaaattatcattaaattgcttgaaattattatttaaattttcatcataatctgctgctgttgaagaaggtaataaagctgatttttcattgatattatgccattcattaagctttgtttgactcttttctgcagtcgcttgagtgataaattcacctggtgtgattgaatcttcacttgattgcttataaattgcaaaatgaattggtatatcttttaaatcatcattttcacgtaaccttgataatatctcactagccatttgtttaccttgctttttaacttcgctatcatctagttttttactaaaagtcgatccatctttttcttttttatagtaataaacactattcatagctaaaccaatcgtcatacctttaatattcttaccttttgtatctccaccaccataaaaatcttgctctaaaatgttagataaataggctggtgatttttctgcaatcttttcaggatctgtttcaccttcgtgtgatggattaagtcctaaattttcattcgctttcttgtcttttttatctttttcagacattttatcgatttcacgttttgtatacttaggatttaaataggcattaattgttttcttgtccaaaaattgaccatcttgatacaaatatttatctgttggaaatacttctttacttaagttcaataaaccatcttcaaagtcgccgccattataactatttgccatgttatcttgtaaaagtcctcttgcctggctttctttaaatggtaacaatgtacgatagttatcaccttgtacatttttatccgttgcaatttcttttacttgatttgaactattgttatgtttttgattatcttttccagcctggtcatccttatggttaccacaagcagcgagtataaagatagctgtaatcaataatactaatgtacgcttcatcgacatacccctctaactatttaattcattttgcttatctacaaattgttgctctgtccaaatttcaatacctaaactttgtgcttttgttaattttgaacctgcatcttcaccagcaataacgacatctgtatttttagtaacgctacttgtaactttagcaccttgtgatgcaagccatttagatgcttcattgcgtgtcatttgatgtagcttaccagtcagtactatcgttttaccactaaattcaggatgtccttcaatatctgatgttttgatacctttataaatcatattaacatgtttatcttttaatttttgaattaaagcacgaatatcttcattttctaaataagtaactacagattgtgctactttatcacctatatcatgaatttctactaattccgcttcagttaccgttagtaatcgatctatcgtttcatatttttctgctaacacttggctcgctttaacacctaaatgcctaatacctagaccaaataataaattttctaaagagttgtccttagcttgttgaatggcagctaataaattatcaacttttttctgccccattctgtctaaaggtaataaatcttcttctgttaaatagaaaatatcagcaacatctttaattaattcgctttgataaagctgttgaataattttagtgcctaaaccatcaatattcatggcttgtcttgatacaaagtgaatcaatccttcaacaagttgtgcttggcattttggattaatgcaacgaagtgctacttcgccttcaatacgtactaattcatgtccacaacttggacaatgggttggcatatgatatgtgacagcatcctcaggtctacgttctggaatactacgtacaacttcaggtatgatgtcacctgcttttttcactacaacactatcaccaattcgaatatctctgtcatgaattaaatcctcattgtgcaaagatgctcttgatacagttgtaccagctacttttactggttctaaaatagcagtaggtgtgactacacctgttcgtccaatacttaattcaatatctaataatttagttactacttcctcagctggaaatttataagcaatggcccatctaggagatttttgtgtgaatcccatctcatcctgttgatctaaatcattaaccttaataacaatcccatcaatatcataaggtaatgactctctttggcttgtccatttttcaatatactctaaaacaccatcgatattatttacacgcgctctatttttattcgttgtaaaacctaatttatctaactcatctaatgcttcactttgcgaacgcgcattgaaatcagtgaaatcattgacactatatataaatacgcttagctttcgttttgccgttaatttagaatctaactgtcttaatgatcccgcagcagcgtttcttggatttgcaaataactgctcatcatttttttctttttcttcatttaatcgtaaaaatgaacgtctcggcatatatgcttcaccacgaacttctacatttaatggttctttcattttcaaaggtatcgcatgaattgtttttaaattttcggtaatatcttcacctgttgttccatcaccacgtgttaaaccttgaacgaagtatccatcaacatatttcaatgatactgctaagccatcaatttttaattcgcacatatattcaacgttgccaatttgttcacgtatgcgttggtcgaattttctcaaatcatcctcattaaatgcattccctaaacttaacattggcgtgtcatggttgactttattgaaagaggcttgggcttcaccgccaactctaactgttggagaatctacagtcttatactcaggatgctcctcttctattttaatcagttcatgaagtaatttgtcatattcactatctggtacagatggattatcctctacatagtattcataactgtattgatttaataaatcatgtaactcgttcacacgagacgataaatcagccatcccttaatcctcctttttttcaattggtgcaaattgcgctaacaaacgttttggcccttgtgatttaaagataatatctagttcgattgagccatttttctcgtttacattactcaccatgccttctccccaggctttatgcatcactttgtcacctacattccaatcagatgacaatacttgttttttcgttgacgttgttcgttgactaaatccgcgtttagcaaaaggttttgccttaggttgtatcgtttgtcgtttgccacttgaatgattttctaatagtgattctggaatttcctttaaaaatctggatggcatatttgactgagggcgaccaaataacattcttgatgtcgcatgagtgatatataacacctcttcagcccttgtaattgctacataacaaatacgacgttcttcttgcatttcatgatcatcttcactcttaatcgctctaatatgtgggaataaagattcttccatccccattataaagacaattggaaattcaaggcccttagccgagtgcatcgtcattagtgttacgccattttcagtatctgcctcatcaatatcagctactaacgataaatccgttaaaaagttaattaatgactgttcttctaatggggtattttcctcatagtcttttggtactgacataaattcatcgatgttttctaatctacttcgagattctaatgtattttcacgttcaagcatttctcgatagccagacttttgtaatacttcatcaactatttcatgaatttctaaaaattcttgttcttttatcaagctttggattaactcgtaaaaattaagacactcttgtgtcaccttttttgacaatccgataaaatcagcttctccaagtgcatcaaacatactgatattgttttgaagtgcatagttttgaactttttcaacagatgaaggacctacacctctttttggaacattaataatacgttgcaaactaatgtcatcattactattggcaattatacgcaaataacttaataaatctttgatttctttacggtcatagaacttttggccaccaaccattgtgtatggcatattagatttcatgaatgtttcctcaagtacacgtgattgtgcattcgttctatataaaattgccatatcttgatatttcttaccattacgttgatgcttcataatttctcgtattacaaattccgcttcatcacgttccgtcattgcttcatagtaatgaattttctcaccattcgtatttgcagtccacagtccttttggcttacgttcagaattatttttaatcacttcgttagccgcatttaaaatcgttttcgtcgaacgataattttgctctaaaaagattgtattcgcttctggatagtctttttcaaatgataagatattttgaatatcagcaccacgccaaccataaattgactgatctgagtcacctacaacacataagtttttaaacttacttgctaataatttaactaatgtgtattgtgctttattagtatcttgatactcatctacatgaatatattggaatttgttctgataatattctagaacttctggtacacgctcaaataagttaatcgttgtcataataaggtcatcaaaatctaacgcttcattacgtgacaattggcgttgatatccactataaaccgttgctaccatttgcgagtgataatctgtggcttctttttgagcatctgcaggtgttttaagttcatttttcaaattactgatcgcaccgataaacatacgaggttcaaactttttactatcaatattttcattttttaagacgtctttaataacagatttttggtctgtaggatcaattatcgtaaaattgcgttctataccaattcgatctgcatcacgacgtaaaatacgaacacacattgagtggaatgttgacatccaaataacttctgcttgatcacctactaatttttgaacacgttctttcatttctcttgcagctttatttgtaaaagtaatagccaaaacattgtatggtgagacatctttttcgtctaataaataagcaattctatgtgttaaaacacgtgtcttccctgaaccagcacctgccataattaacaatggtccttctgttgtctttacagcttcactttgctctgtattcatatgatttaataacgcattcatttactagactcctttatttttactgtttttaaagcttttttaatatctttataaataatatcaccgacgataattgtatctgcaatagctgccatctctgtcgcttgttgttctgaggaaataccgccaccataaaaaagttgcgtttctgttagatgttctgagacagcttgaacctttgatacgtcgccataaatgccactatactctatatacataaccggtaatcgatacatatgattgaccatttgggcatatgcttctaaatcttctgttgttaaatctgtatttgctttggtatgttttgccactttgctatcagcattgcacacgacatacccttcaaatattacttcctcaaaatctatactatgtccatatgttttaagcgcttctaataatgtaccattgtgaaatacaacatctgtactgttcagtactgtaggtacaaaataaaaatcaaaaccaggcattacactttcgatgtttgatatttcaagtactaaaggcaatgggtatcttcttactctgctcattaaatgaatgacattatcttcagtaacgtcatcagttccaccaatcataattgcatctgtttgagacatacaaatcgcatctaaatcatcatctgaaatatgtttagctgggtctaatttaaaaatatggcgccattttttaatgtcatacattttccgaaactccttttttaacatacatatgattatagcatttttaagtgtcgagttctaaagacttaatatgaaatttaagttcttttactctgtaaattttttcgtgaaaaaacaatgattatctaccttattagtgcagatagataaccattgtttatcgttcatttattattcatttgtttcaatattcatacgatctaaaatcattgtataagcatcattaccccattgtaatgaacgcttcactctagaaatcgttgcagtcgatgctccagattcttgttcaatcgttgcataggtataaccttgcttaatcattttagcaacttgtaatctttgagacagtgattgaatttcatttacagtacacaaatcatcgaaaaattggtaacattcttctctattttctaacgttagtattgcatcaaacaattcatctaacgctgcacctcgtaatttttcaatttgcatatcgaaacaacccctataattttattctttatgtcattttaacgcattaatctattaaagtgtagcgatttatattttattaaatctgaatcgttactttatttaattttatgctaatccagcgcgttcgaaaatagtgtcaacttgattcaaatgatgtttaggatcgaaacattcatccaattcttcttttgttaaaacacttgtaatagactcatcttgttcgattaattcacggaacggtgttttcgtttcccaagatatcatcgcttttggttgtactttgtcgtatgcttcttcacgaaccatacctttattaattaatgctaataagacacgttgtgagaaaatcagaccaaatgttttatctatgttattacgcatattatcttcaaatacagttaaacggtccacaatatttgtgaaacgattcaatgcataatctagtgctattgtaacatctggtaacataatacgctcagcagaagaatgagaaatatctctttcatgccataatggcacattctcataagctgtagtaatataaccacgaatgactcttgaaatacctgtgatattttcagaaccaattggatttcgtttatgaggcattgcagatgaacctttttggccttttgcaaatgcttcttcaacttctctcgtttcggttttttgaaggttacgtatttcaacggcaaatttttctagtgatgtcgcgattaatgctaatgtcgcaatatagtatgcatgtcgatcgcgttgcaatgtttgcgttgatacaggcgctgtgccaatacctaaatgtttacacacataactttctatttcaggaggaatgttagcaaaagtacctactgcaccactcattttccctacttcaatttcttctcttacttgtttgaaacgttgtaagttacgttgcatttccgtgtaccacaatgccattttgacaccaaatgtagttggttctgcatgcactccatgtgtacgtcccatcatcaatgtatatttataattttttgctttttcagctaaaacgtcgataaatctttctaaatctttttcaataatgtcatttgcttgtttaataacgaaacttaaagctgtatctacaacatcagtagaagttaaaccataatgtacccacttacgttcttcacctagcgtttcagaaacttgtctagtaaaggctacaacatcatggcgcgtttcttgttcaatttcttgtgcacgttcgacatttacctttgcgttttgacgaattttttgtacgtcagctttcggtatatgtcctaattcactccatgcttcacatgctaaaatttccacttctaaccatgcttcatagcgattttgatcagtccaaatattagacatttcttctctagaatagcgttcaatcatttttttaactcctatcgtatgtatactcgaattttcaaaaacagaacattttttaataaaaataaacaaaaagttcgtttttaactctactcttcacagtttaacagaattggttataaatgtataaaaaatttccgtatattctcattctattttattttttacattaatacaattatctatggcagattaatactgatttctaattgtaaatgttcgcaatactttaatctaattggtatttataatgatccattgagaatatatttttgcattttagtttttctcccctcaactacactatccaactttttattacaattaggacaatcaatagctttagtaataccagaatttattcactttacttctcctattgtatggaattttcaacaatctacttttcctagtttcataatatttcttcttacatttcataatatgttttaaaattattcgcttctaatataacaaattttctactcacaaaaagaatatatattctattgcataggtgtggcattttaaatataagacattaatattgaactccagaatcgtataaatacgaaactgattatagaaaaatacgcagagatttttttaatagtaaatttttatagaaagacataaattgactacgcttctttcaaaatcgactaatatattttcatgaaactttcgatcatattaattattgaatgagatgtttgcaatttagtaaataagctactaaattattacataaactgataatgtgtaaaaattaattattttttaaacatagattaaaattttatattgaaactcttaactaaatttaatataattattttataataaaataaaggagtttttatatgaaaagaaactttccaaaattaatagctttaagtttaatattttctttaagtgttacccctattgcaaacgctgagagcaattcaaatatcaaagcaaaagataagaagcatgtgcaagttaatgtcgaggacaagagtgttcctactgacgtacgtaatttagcgcaaaaagactatctttcttatgttacttcacttgataaaatctataataaagagaaagcctcgtatacacttggtgaaccttttaaaatttataaattcaacaaaaagagtgatggtaattattattttccagttttgaacactgaaggtaatatcgattatatagttacaatttcaccaaaaatcactaagtattctagttcatcttctaaatacacaatcaatgtttctccatttttatctaaagtcttaaatcaatataaagatcaacaaattactattttgacaaactcaaaaggttactatgtggttactcaaaatcataaagctaaactagtactaaaaacaccacgtctagaagataaaaagttaaaaaagactgagagtatacctactggcaataatgtaacgcaactaaagcaaaaagcttctgtcactatgccaactagtcaatttaaaagtaataattatacttacaacgagcaatatataaataaacttgagaatttcaagataagagaaactcaaggtaacaatggttggtgtgcaggctatacgatgtctgaattactaaatgcgacttataatactaacaaatatcatgcagaagctgtgatgagatttttacacccaaacttacaaggacaacgattccaatttactggtttaacgccaagagagatgatttattttggacaaactcagggaagaagtccacaacttcttaatagaatgactacatataatgaagttgacaatcttactaaaaataataaaggaattgctgttttaggtagtagagtagaatcaagaaatggtatgcacgcagggcatgccatggcagttgttgggaacgctaaattagataatggacaagaggttataattatatggaatccatgggataatggttttatgactcaagatgctaaaaacaatgttattccagtatccaatggcgaccattatcgatggtattcatctatttatggttattaaaatttgtattttagaaaggtaaataatattatggaacaaattgaattatttagtattgataaattcaaatgtaattcagaggctaagtattatcttaatattattgagggagaatggcatcctcaagatttaaatgatagtcctttaaaatttattctcagtacctcagacgattctgattacatttgcaaatatataaatacagaacacaaacaactcacattatataataaaaataatagctcaattgttattgaaatatttataccaaatgataataaaatactactaacaattatgaacacagaagctttgggaacttctcctagaatgactttcattaagcataagtcataagactatctagatatgattaagtaaactattaatcttattaaaggtctctaggaagaaaaaatttcatgcgatgagattgttttagaaaaagcgacgatatatataatctaacaataatttttaaaatattaagaacccccagcatatgctttatatagcttgctgggggtttctcatacaatatggatcgagcatcttgcatgtataaacaaataggctattcaaagtaaaattactcaaactttgaatagcctttcctcttcaaatagtctttatttaaattggattatgttattggattttcttacctacaaaaacgatttcttgatgtgatacttcaaccgtgccatctttttgctcttgaaacacgggtttttcaatacgttttaccggcatatacccttgcattttcattcgtgacaaacaatcagcaattgtttcattctcatttactttgaatttcatgttctactacactttccagttcttctggttcataatctttaagctttctacgacgaatgcctttagtccagaatccaccatgtatgtttcgaggttcatacgcaatgataaatgctttcggatctaaattttttatcgtatccatcaatttacgttcatattttcttggtgttaaaatttgcatcaccatacgactaccatctctaccaaacgcagcatagtgcgtaacgccatatcctaaatttcgaagttcattcggtaaatctaactcatattctgctgaagttacatttacaactgtataacctaatgccagtttttcttctattttcataccaacaatgatacctattgaaaaaccaaatgcgtaggcaataatattttgaatatggtctaaattagacataaccaaacctaaaccaacgatataaactaatacttctaaaaaactaactgatgcagcaatataacgataacctttcaacgttaaaattgttcgcatcgttaaaaacgttacataacaaacgttaatgataaatatagttagtaccattaaccatggattttctgttacgaatgacataaggcgccccactctctttcaattacactttaaataccaaactgcttcaacctaaccttaatgaatgcatattaatataatatagtacgaaaactctcataaataaatagcgaatttgtcataaataaaaatttattctcaaatgaacatacttactttagttcatacactttcaatttatacactgaagtagtctagctgaatgtggtttaatgttattaattctaactcatatttaatttaagtcacacgttagaagaaaaaattaaattaggattttggccacgtgtatcttgtatatgcaagttcacgtttgtgtgcatttcgtatataatgattttcaattactttttgttcttctggcgtaactggcttaccttctaaataattatcaatcgcctcataagttacacctaatgcatcttcatctggaagctgtggtttatcatcttctaaatcagcagttggcgttttttcatataattcctttggcgcaccaagatacgctaataattgacgaccttgtcgtttattcaaaccaaatataggtgcgatatctgcagcaccatcaccgtacttcgtataaaacccagttatattttcagctgaatgatctgttcctactacaataccttgtcggtttgaagcaattgaaaattgtactttcatacgttcacgcgctttttcatttcctttttggaaatctgtaagaacaataccggcttcttttaatgattgcacactttgatcaactgcaggcttaatattgactgttactatttcatctggttcaatgaatcgcaaagcttgctcaacttcatcagcatctttttgaactccataaggtaatttaactgcaataaacgtacaatcaatgccttcttcacgtaattcgttaacagacatttgtactagttttccaactaatgtagaatcctgtcctcctgaaatacctaacactaaagattttataaatgaatgtgattgtacataattttttataaattgctttaattccataatttcttcagcactatcgatacgctttttcactttcatttcttgtacaataacgtcttgtaatttactcattatcttcttccatctccttaacgtgttccgcaacttcaaaaatacgtttatgtttattatcccaacatgccttgcttaaatcgactggatattcttgtggattcaggaaacgcttattttcatcccaaatagattgtaatcctagtgctaaatattcacgtgattcatcttctgttggcatttgatatactaatttaccattttcataaatattatgatgcaaatcaatggcttcgaaagattttataaatttcattttataagtatgcactggatggaataattttaaaggttgttcatcgtatggattttcattttccaaagtaatataatcgccttctgccttacctgttttcttgtttataatgcgatatacatttttcttacctggcgtcgtaaccttttcagcgttatttgataatttaatacgatcactatatgaaccatcttcattttcaatagctacaagtttatatactgcacctaatgctggttgatcgtatcctgtaatcagctttgtaccaacgccccaagaatctacttttgcaccttgtgctttcaaactcgtaatcgtttcttcatccaaatcattagacgcgataattttagtttcagtaaatcctgcttcatcaagcatacgtcttgcctctttagataaataagcgatatctccagaatctaatcgaatacctacaaagttaattttgtcacctaattcttttgcaacttttattgcatttggcacgccagattttaaagtatggaatgtatctactaggaacacacaatttttatgtctttcagcatattttttgaaggcaacatattcgtctccataagtttggacaaatgcatgtgcatgtgtaccagacacaggtataccaaataatttccccgccctaacattacttgtagaatcaaagcccccgatgtaagcagctctagcgccccacaatgctgcatcaatttcttgcgcacgacgtgtaccaaactccattaatttatcatttgatgcaatttgacgaattctgctagcctttgttgtaattaatgtatggaaatttacaatgtttaataaaattgtttctattaattgcgcttgaatcaatggtgcttctacgcgtaacaatggttcgttaccaaagcataattcgccttcttgcatcgaacggatgctgcctgtgaattttaaatcttttaaatatgataagaaatcatccttgtagccaatagactttaaatattccaaatcagattctgaaaatccaaaatgttctataaaatcaatgacgcgttttaaaccattaaaaacagcatagccactattaaatggcatttttctaaaatacaaatcaaatacagccattttttcatgaatattatcattccaataactttcagccatatttatttgatataagtcattatgtaacattaaactgtcgtcttctaattggtacacttgtatctctccaatcgacctaaatattttcttacattttatcataattcatttttttatatacataagagccccttaatttccatacttttaattaaaatcaaccaacaatttaatgacatatacataatttttaagagtattttaataatgtagactataatataaagcgaggtgttgttaatgttatttaaagaggctcaagctttcatagaaaacatgtataaagagtgtcattatgaaacgcaaattatcaataaacgtttacatgacattgaactagaaataaaagaaactgggacatatacacatacagaagaagaacttatttatggtgctaaaatggcttggcgtaattcaaatcgttgcattggtcgtttattttgggattcgttaaatgtcattgatgcaagagatgttactgacgaagcatcgttcttatcatcaattacttatcatattacacaggctacaaatgaaggtaaattaaagccgtatattactatatatgctccaaaggatggacctaaaattttcaacaatcaattaattcgctatgctggctatgacaattgtggtgatcctgctgaaaaagaagttacacgcttagcaaatcacttaggttggaaaggaaaaggtactaattttgacgtgttaccactgatttaccaattacctaatgagtcagttaaattttacgaatatcctacttcattaattaaagaagtacctattgaacataatcattatccaaaattaagaaaattgaacttaaaatggtatgcagtccctatcatttccaatatggacttaaaaatcggtggcattgtatatccaactgcaccctttaacggttggtatatggtaactgaaattggcgtacgtaactttattgatgattaccgttacaatttactagaaaaagttgcagatgcgtttgaatttgatacacttaaaaataattcatttaataaagatcgagcacttgttgaattgaactatgctgtgtatcattcctttaaaaaagaaggcgtatcaattgtcgatcatttgaccgctgcaaagcaattcgaactattcgaacgtaacgaagcacaacaaggtcgtcaagttaccggaaaatggtcttggctagcaccgccattatctccaacattgacgtcaaattatcatcacggatatgacaatacagtaaaagatccaaactttttctataaaaagaaagaatcaaatgctaaccagtgccctttccatcattaagttagtagaggtgtagcatatgcaattatattatttaggccctaaaggtacattttcatatttggcttgtcgtcagtatttttctgaaaatgaagcaacttttcaaccaaagtcaaatttatttgaagtcatcaaggcagttgcagatgatgacacatcgattggtgttgtccctattgaaaattctatagaaggaacaatcaacattgtggcagatgcacttgcacagcaagatgtctttgcacacggtgaaatacgtttagatattaactttgcattatatggtaatggaacagattccatttctgatattaaaaaagtgtattctattgcaccagcaatcagtcaaacaacaaattacatacatcaacatcaatttgactatgattatgtcgacagtacaattcaaagtttgactaaaattgaaaatggcgttgcagcaattgcacctttaggtagtggcgaagcttatggttttacacctattgatacacatattgaagactatccacataacgtgacacgttttttagttataaaaaatcagcagcaatttgatcaaaatgcgacatcattgatgtttttaattacaccaatgcatgataaacctgggttgttagcaagtgtgcttaatacatttgctttgtttaatattaatttatcctggattgagtctcgtcctttaaaaacacaattaggtatgtatcgatttttcgttcaggctgattctgcaattacaaccgatataaagaaagtcattgctattttagaaaccttagatttcaaagtagaaatgattggtgcttttaattaaactttattttctaggttctacaatttaaataaaataaagagtcaaccaaggattaaaataggaatccatccttggttgactttcttttgtttgtattgtttttacacgatgctgcggtatacgtttcgttaccactcgtccaagcaattgctaatgtaaccttttatttttcgttctaatctgcaattactatttcaatggcagtggttgatttatatcaatacctaaaactataggcattacataatacacgactaaaataataattattgcactgattaagtttacccagaatcctactgatgccatttgtttgatagatattttaccagaaccaaagataattgcattcggtggtgtccctactggtaacatgtatgcacagttagccgccatagctgcaggtgccataagtagtaatggatgcactccaacagcaacagacaacgttgctaaaatcggtaaaatcatcgttgcagttgcagtattagatgtcacttcagttaaaaataagacaaagattgttatgacaattacaataagaatcggactaacaccatttaatgatttcaactgttcgcctaaccattttgctaaaccactttcagaaatacctttcgctaatgctaaaccgccaccaaataaaattaatacaccccaagggagctcttttgcaacttcccagtcaatgatacggcgatgtttttcagtatttttagctggaataataaataataatattgatataaaaatagcaatcgtaccatctgcaacagatgacgtaacttcccattttttcagaagaaactctcttgtaatccataataagctagcaagtacaaagatagtttgtactaccttttcttcatacttcattttgccaagctcgtctaacttttgtttaattaacgtctgaccaccaggtaaatatttcaaatcatgtctaaacgcaacatatcttaaatagagccaagtaatacctaacaaaacaatgaccgttggaatccctacaatcatccatttagcaaaactaatttcatgtccaaaatgttgcatgtattgtccttttaaaataattaatggcggggttccgattaatgtacccaagccaccaatcgtacctgcatagccaattgctaaaactagagatttttcaaacttttgaatacttgtttgattcgtattggcttcttgtaaatcatgtgcttccttaataattgctaaaccaatcggaatcataatcattacagctgcagtgttcgatacaaacatagataagaatcctgttgccaccatgaatccaagtaatatttttgaagtgcttgcaccaatcaaattaataattgtcaacgctactctcgtatgtaaattccatctttccattgcaattgccaaaataaatccacctaaaaacaaaaagataatatcattgccatattcggatgatacttgttctggtgtaagtatatgacctaatggtaataacacaattggtaataagctcgttgctgcaataggaattgcttcagtaatccaccaagtcgcaatccataaagtaatcgctaaaacatagacgcctttccaaggtaagtcttgtggatgaaagaataataatgttaataggaaaagtaatggacctaatattagtccaataagttgtcccgcactaaacggtttctttttctttgattttgaaaagaatgttaaataccttttcgatatcattgattgatgttgattgaaataagccataaatttccccctcatgatgattatgacaagctacttcaactcactatattagagtatagaaagttgtctatcttgtattatcattaccgtcaaaataccccttttatcagataattgggtttattatagcatatttataccgttttatgaatgcgctttcaaaaattatctactattcttaatcctaatgtcatgcgaaactttttacttttttatttcatctacattgattgtagtaacttgaatacccgcttcaacaggacttaaaaacactgtatcaatatcttctaaatgaattgattgagtcgaattattgaatgtattcccaacgattaatacatctttatgtttaacattattataattacgtacatgtatcgcatctttagacattgatcctttaaattcatttccaattatattcatatttatgcctgcttgggaacctaagtcttttcctgtcatcacatctgctgcatttttaccatctctaactcctaaatatctaatgccaccctcacagttaataaacttattattaataatgaaagcatctttatacttcaagggagttaatgcataaccttgtatatcttcaaatatattatttctaatatgaatattctcatagtatcgattatgtctacttgcatgtgagccaatagcacgattccaacttcccatttcgggcaattctgaaggtccaaaataacaatcttcgataatgacatttttcgttatcgtaccatctgtcgttccgaattttggaaaagcaccaggtacttgaatgtctaattgtattgcttcagaataaaagcgttcgccactatagtctatgaatccttcaaatgaacagcttttaatatagagtccgttaatcccacaagcatcaattgcatgaccactcactacattcttaatggtcacacctattaattgaatatcttcagcatgcccaatgcacatagctgtattgttataaggatacgatacaccattcatatcaaacttgccgcctttaatatgaatatgactgtgtccattataaccacgataaaaaccaaagcgacgaccattttttaataaaggaccagaatgacatcggcgtaaaatagtttcattatctaacaaaagtgttgtattgccatatatcgttaatggtttgcaaatatcatacgtccctttcggtatataaactgtcgttggtttacatcttccacgatttaacgcacgttgtattgctcgagtatctttagttttgtttatgcctgttaacccataatctttcatattgatatacataaatcgtcatcctttgtctattttctaattactcatatattaaccaattattcaaattataatcgtgttaggttgatttaacagatagtcataaatctcgtgatgccatctattagcatttttatattcaaaacatcaacacttgatattagttctaagtttgtcacatttagtattctattacagctattttaaaactatcgcaaaaatttcttatattatttgttgattgcgtgatttgctcttccaaaaaagttgattaatctatatacttaatctatatttatatattaaccattagggttaaaaattactctagcatttatgaatagatgggagtttattttattattatataggagagatgttgaatgacacatcgcgcactattagttgttgactattcatatgactttatcgcagacgacggcttactaacatgcggtaaacctggacaaaatattgaagattttattgtttctcgtatcaatgactttaattattatcaagaccatatattctttttaatggatttacattatttacatgacattcatcatcctgaaagtaaattattcccaccacacaatatcgtagatacaagtggtagagaattatacggtaaagtaggtaaattatacgaaacaattaaagcgcaacctaatgtacatttcattgataaaacgcgctatgattcgttctttggtaccccgcttgatagtttattgagagaaagaagtattaatcaagtcgaaatcgttggtgtatgtaccgatatttgcgtgttacatacagcaatttctgcatacaacttaggttataaaatttcagtacctgctgagggagtggcttcatttaatcaaaaagggcatgaatgggcacttgcacatttcaaaaactcattaggtgcagaggtagaacaacacgtttaaatcgtgctaaaataattataaagaatacaatttacaagggagatatttgacaatggctaaaacatatattttcggacataagaatccagacactgatgcaatttcatctgcgattattatggcagaatttgaacaacttcgaggtaattcaggagccaaagcataccgtttaggtgatgtgagtgcagaaactcaattcgcgttagatacatttaatgtacctgctccggaattattaacagatgatttagatggtcaagatgttatcttagttgatcataacgaattccaacaaagttctgatacgattgcctctgctacaattaagcatgtaattgatcatcacagaattgcaaatttcgaaactgctggtcctttatgttatcgtgctgaaccagttggttgtacagctacaattttatacaaaatgtttagagaacgtggctttgaaattaaacctgaaattgccggtttaatgttatcagcaattatctcagatagcttacttttcaaatcaccaacatgtacacaacaagatgttaaagcagctgaagaattaaaagatattgctaaagttgatattcaaaagtacggcttagatatgttaaaagcaggtgcttcaacaactgataaatcagttgaattcttattaaacatggatgctaaatcatttactatgggtgactatgtgactcgtattgcacaagttaatgctgttgaccttgacgaagtgttaaatcgtaaagaagatttagaaaaagaaatgttagctgtaagtgcacaagaaaaatatgacttatttgtacttgttgttactgacatcattaatagtgattctaaaattttagttgtaggtgctgaaaaagataaagttggcgaagcattcaatgttcaattagaagatgacatggccttcttatctggtgtcgtttctcgaaaaaaacaaatcgtacctcaaatcactgaagcattaacaaaataatactatattactgtctaattatagacatgttgtatttaactaacagttcattaaagtagaatttatttcactttcaatgaactgttttttatttacgtttgactaatttacaaccctttttcaatagtagtttttattcctttagctaccctaacccacagattagtgatttctatacaattccccttttgtctttacattttcttaaaatatttgcgatgttgagtataaatttttgttttcttcctacctttttcgttatgattaaagttataaatattattatgtacacgattcatcgctctattttcaactttcaacatatataattcgaaagaccatttaaaattaacggccacaacattcaaatcaattaatcgctttttccaaaataatcatataaggaggttcttttcattatgaatatcattgagcaaaaattttatgacagtaaagcttttttcaatacacaacaaactaaagatattagttttagaaaagagcaattaaagaagttaagcaaagctattaaatcatacgagagcgatattttagaagcactatatacagatttaggaaaaaataaagtcgaagcttatgctactgaaattggcataactttgaaaagtatcaaaattgcccgtaaggaacttaaaaactggactaaaacaaaaaatgtagacacacctttatatttatttccaacaaaaagctatatcaaaaaagaaccttatggaacagttttgatcattgcaccatttaactatccttttcaactagtgttcgaacctttaatcggtgctattgcagcaggtaatacggcaattattaaaccatctgagttgacgcctaatgttgcacgagtgattaaacggttaatcaatgaaacatttgatgcaaattacattgaagttattgagggaggaattgaagaaacgcaaacgttaattcacttaccttttgactatgtcttctttacaggaagtgaaaatgtaggcaaaatcgtttatcaagctgccagcgaaaatttagttcctgtgacattagaaatgggcggtaaatctccagtcatcgttgatgaaacagcgaatattaaagttgctagtgagcgcatttgttttgggaaattcactaatgccggccaaacatgtgttgcaccagattacattttagtacacgaatctgtaaaagatgatttaatcacagccctatcaaaaacgttgcgtgaattttatggtcaaaatatacaacaaagtccagattatggccgcattgtaaaccttaaacattatcatcgtctgacttcattacttaacagtgcacaaatgaatattgtatttggtggtcatagtgatgaggatgaacgttatatagaaccaacattgttagatcacgttacaagtgattcagcaattatgcaagaagaaatttttggtcctatcttaccgattttaacgtatcagtcattggatgaagcaatagcctttattcaccaaagaccaaaacctttgagtttatatttatttagcgaagatgaaaatgctacacaacgtgtaataaacgagctatcatttggcggcggcgctattaatgatacattgatgcacctagcgaatcctaaattaccatttggtggtgttggtgcctcaggtatgggacgctatcatggtaaatattcattcgacacttttacacatgaaaaaagctacattttcaaatctacacgattagaatcaggtgtccatttaccaccatataaaggtaaatttaaatacatcaaagctttctttaaaaattaatttttgagacaaaaataaaccatgcttccataatttgatgttcttgaaaacaataaatttcaaggtatacacaaattttttggaaacatggttttctttttatcatgattaattaaagattaaaatatgacacatacaccttcagatgctacacgagtgttatcacatagcgtaattttacctgtttctttatttctttcgaaaacagttacaactgaatctccttgctcatgagcacaaactaaaaggtcatctgatgaggcaatattaaaatctcttgggaattgaccaccactttcagtaattgttactagttctaagtgttgaccattatcaagaactttaaaaattgcaatgctatcatgccctctattagatacatataagaattgttgatcatgagataaacgcactgctgcaagtttagtatctccatcaaagttttcaggaattgttaaatgacgctcgagctcttcaaatttaccgtcattatattctgcaacactcacagtatttgataattcgtgtacgacataagcaaattttccattatcatgaaattcaatatgtcttgtcccatcactatctttaaataaagattctttataaaattcaaacccgttgtcatcaaatttataagtaacgatacgatcagcacctaaatctgttactgcaacgtacttaccatctggagtttgattaatataatgtgcgtgtggatgatcttgtctttcatgtgtacctgttggaaaatcatgtgcaagttcttgaattagacgtataatttcacctgtgtgcgtatttaattcatacatacgtatgatgccagcaccatataccgcttcaaataaatatcgtttatcttctgaaatcgatacataacaacctgtaccagcttttgaagacaaacatttatttaataaatgcaattcaccattgtcatcaattttcaaacttgcaacaccgcattgttctccttctttgttgattccatataaaacttcattattacgcaccaaatatgtagacgcttctaattcaaatcctgtttctaataaatcaatacgtgactgattttcgtttaattcaaaacgataaatccctttaccattctttttagtgtaagaaccaatatatccatttgtcattacttttacccctccatgttagtcttattttcattttattaaattttagctagaattaacaatcatttatcatttccttaaagctaaaactatttaactactttaaaagaactatttgctgtgatatgtcattattcgattttaattaatccctcttttttacttacacgagcattaattattaacgcgtttatgcttccacaaaatttttgttgcaaaatagaacacatgttcgtataatgtaattatcagattggggtgaattaaggatgacaagttatgaagaagaaactgattatcgtaacgttccaagagaattactagataacaatatacctatgggaagaggcatgattaaatgggctccttttgcaacattacccgaacaattcgaaacgattcaacaatacattatcgaccaaaacaaaattacacgtcctgtattatcagatgatcaattggctgagctaaacattcggctacacgaggcgctacaatatgcccaacctgtagaagttaaattttataataatggctttgtagattcagtacgcttaaccatttatcgtattgatgctattaattatgaaattgatggttatgtttacaatcagcaacaacgtcaaaaaatttctatctttgatatcttagatattgtcttgttaccttaatgctttgaacataattaaacagattgagtatatgcatataagatgatttttaacatcatttttggatgataggatgttgcgccacgatgatgtctgaattcatcgaattcgctatcaggtattgtttcaacaatttcattaacatatcgtgaaatatcattttgagggattctaacagaagtttctattggtagtgtagttggggcatgttataatttttatacataaggcacctcgttaatttagtttagtggtatttattaaattataagaagggacccaacacagaaaattcattttattgaattttacatttatgtgcaagttgggcaaagtgtcttattttttaaaagtatttcaaagtaaaattacatgttaatacgtagtattaatggcgagactcctgagggagcagtgccagtcgaagaccaaggctgagacggcaccctaggaaagcgaagccattcaatacgaagtattgtataaatagagaacagcagtaagatattttctaattgaaaattatcttactgctgttttttagggatttatgtcccagcctctaaatgttattagttatttttactttcaatatcagaaataatttctttagtttttctttcaatatcttcaaaatcttttttaaagatataagcaaatgctactacaccaacaccagcaactaatgttgtaatagcaactaagctaaatacgaatttaaacacacatttaataaaattccacatctcaatttcacctctgttaaattaaatacctatctacatttcattatactatcatatatagaataatcattaaataaatacccactttcacgaaatatattcatcaaattatatagtgagcaagctaatgattattttcaaaaatgccgaggaacctctgtttcaacgtgacatgaccttatatgctaatgttaacaatgactattatcgtgaatgctaacttaagattgatatttatgataagatgattttaagtttttaactcaatatccccaccatctataaaaatatgttttaactgattgataagtcttatacaccgagaaatcacctcaaacaattttatatttcatttagtaaaatataactttatttaacatgacattcaatatacatacgattactatttatttacaatatattacaactaaaaagaaaggggccgatgatatgcaacaagtgacatcagatatcatgacttttagaggttcacatttcgagttaggtgttaaaactggtaaatggcttcaacaaacacctcttctaaaaaatcgagaaaaagaatggaaaaaacgtgtcccacgtttcgatatagatgtaaatgaaacttatcaaatattccaaacatacgcacctcaaatatgggaagaattaatgggactacaaagtatactcaaaatgccaacacgccaaattattttaaactttggacattatcgttttaccgatttaaaagaaagtggttgcacggtctttcaaggcaaagacttcatggttagaaattatgattaccaccctgcaacttatgatggtcgctacttactttatcaacctacagatagcggtttagctcaaattggtcctgtatcaagggtaactggaagaatggatggtatgaatgagtcaggattaactatgggctataactttatgcaccggaagaaaccagcaaatggttttgtatgttatatgattggtcgtctaattcttgaaaattgccgaaatgtaacagaagcaatccaattattgaaagaaataccacacagaagctcatttagctacatactgatggacaaatcattgaaccatgcaattgttgaagtgacaccgagatcaatagatgttcgttatgataatatatgtacaaatcattttgaaatattaacacatgaaaatcgtaattatacaaaagaatctaaagaaagactggcgcgtaccatttcacaaactaatgataatttagatatgactacagcatttaagttattcaataatcctcagtatgaaatttacagtaaactattcaaaagctggtctggcaccatccatacatcaatgtatcaacctgaaacattaactgcatattttacattgggagaaaatgcgccaccagaaataatagatttcaaatcatggttagatggtcaagaccttaatatcactcactttactggcaatatagataccgacttaacttttgccaacaaataaataacaccgatattagagaaattatgcttcctaatatcggtgcttacatcctttatttattcaactttgatattaccatcaatcgtataaaattctaaaacattgtcgcttttcccaactttaccattagtaaatgttttatttttaactacgctatcacccgttcccggatttagctttagtatagtgtcttcaggtttactatcatacttaaaacgaatatctccttgtttagtagaagcttttgcatctacttttgatggcatgtttttaaattcaatgtcaccatgatcgtttaaaaatatggattgtttaatttgactcttgtcgatttgtagcgtaccaataacaactttaatattgctatttttaatgttacttttactaatataagtagaactattatttgtctttgaatctagtgcgtcaagatttgagtttttaataactacttcaccgttaatgctttgaatacttgtgttctctaaatcaacatcactgattctaacacttcctgctccagatgatagatttaaacgtttaatcattttatcaggcatttcaatcgttaacgttttcttattctcatgaaaaggattcatatcaattgcatatcctcttgtcttagaccttttatcactaatcttcaacgtcttatctactatattaattaatatatcattgtcaccatcatatttaactctaaattgattcccccgttttatacgaagttctgtactatccaaatttatagatacattgtcaaaagcatcgtctttgaatgttttatcatattgtttagtaccatatttgtttttatcatagctgaaccaaataatggttgctgctgtaaaaaagacaacaaacactaaaagcccaataaaaaagaatttcttcattttctaacgcttcctttgacagttttaatataccaaagtaaatattttaagattaaacgataaatgtattctaaaatcttaaatatgacaatgataaatactaatcctaatcctgaatatgatatggcaaaaaatacattactaattgagtccacaattcctctggatattgctgatgctaataaaataattggacaaaacagcagcaaaagtgatattaaaaataatgctaatacaaataatccaactatagatactggtataaggatgacaaaaatagatagaatgcctaaacttaatgaagcagcaacagctcttgaaatattttcaaatgttggtttagattcagcataatcaataacacttctagcttttgtttcagctgcaacatcttgtgggtcttttaacttctttaaaatttccccttcatcaacgccattaagttcttgctcataaaaataacgttcatattcatacattttttgatctcttaaatgcctaggtagcgcatcaagtgctgtttctaattcatttaaataagtaatcttgttcatataggtcactcatcccaataaaattattcattcgttttttataactttaagacctaaagctatttactaaaaaattcaatacgtttaatttctaaatcttgataaagtaagtttaattttaaatggttatctctatcaatatactttaccgatgagaaatcattgccaacttttgttcttttatatccgaatccaagattttcaatcgcgttatttatcggcgaaccaattcccccatcaaaattagtatgtatcttttcatctcttactaatattatccccttaacgatgttatccttttctctcactttaacggtaagatcagggtgagctttactgttataaaatttaaaacgatcaaacttaatttttttatttacttcatagccttttttatcaaacttctcatttaatttaatatcgtttatttcaagattagacaaatccacagttttcgtatgacgatattgatataaaccaattaatacaccaaaagaacagattaaaaataatataaacacaacccagcgattttgaatacgcactgatgtcaccctttctttgtacttatttaaatatagcataaggtgcttcccgtttcatccttaacaaaaattaacaaagaatttgcaattaatttatttcattaccttttattactataaattggtataatgttgtaaatgctaaaggaggtttttacaatgacaaatttagaaacttatttcaaaaatagccaacccttaaatgaatacattgatggaatgaagacaaatcaagataccgttctcagtatctatcaatcatttgagttaccagaagatgattcacgcatcaaaaaaataaaagagatgaattattctaaagtattagtaattactgaagactggtgtggagatgcaatgatgaatctcccaattctaaaacacatcagtgaagcattaaatttagaagtacgcgtgttccatagagatgatgatacaaaactgatcgatcaatatttaacaaatggtaaatcacgtgcaattcctatcttcgtattcttgaatgatcaattcgaacaagaaacagtttggggaccaagagcaaatgaagtccaaaaatttgtaactgatgttcgtgctgataaattaccgagcaaagatcatccagactatgcagatttagaaaaagaaacacacttagttatatcaaaccgctataaaactgacgcttcattttggaaagcagtttataattccatcctaaataaattagaaaataaataaatttacaataagacaaactttgaggttgggaaaatttaaaattcccaacctcaaaattatttttattaaatgtcttttttagcgacatataagatattcaaaatgaagaatatcactatagaacctaatgaaattacccattgccaattgctaaaatcaaagttagagctaatcattttatcagttaagtaagcaaaagggatataatcaaaagcatctaaaactttttcaccgtatcttgggataaatgtaataaaaggtttaataaacggtacaatgagtactaaaaatacacctaatgaaaatatcattgctgttttttgtgatgcaagtgtgattaagaataaaaacaagccaaagaatagtaaaaagattaggaagaaccataaattatctacatatttagaaaacgccaaattttttccattactagatgcctgcacaacaatcaaaatcacataatgaattaatgcaaataatattgaaattaaaataattgaaattgttttcgaaataatgtatccaacgcgtgttttaactttactcatatatagttgaattgtaccttgtgaaaaatcacgcgtaattgtcttaacaacaaacattaatccaattattaacaataaccattttgctgcagcaaatacagatccatagacaataatatgtttcgggttatccatcgaatttgccataagtatactttgagttgcaatcaaactagatacgactagtatcgctaaatatgttaaaggacttttaaatatactataaaaatcatacttaactaaatttaaaattctcattatttatcacctctttgatttatattgaagtacgtatcacgcaatgaacttttacgtgtttcaatatatttcggataaatatctaattcagataatgcttttagtataacttgataatttttttgtgcattgatcattaaatgtccgtctgctttgtcgacattttgtaattggaaatgctctgcaagatatttttcagttctatcaaagtctttatgatcaacagtaactatcgttgtgtcagatgcaacaccttcctccatgtttacatcttgaacaaaatgtccgtctcttaaaaatacagctctatcacaaattaattcaatatcttctaacttatgacttgatattagaattctcatatcaagttcatttactaaagacttaattgtagtcagcacatcaattgagccatctggatccataccatttgtaggctcatccaagattaaaaatttaggtttattcattaaagatactgcaattgctaacttttgcttcatccccattgaatatttcttaactttctttttaatataaggtctcataccaaatgcatctataattttgtctgtgtatgctttatcaaaacccttacctaatacttgtgcaaataatttcaagttatacaatcctgatttattatcatataatttaggatgctcaattaaaaaaccgatattatctgcattatcaatatctacttttccatcaaatttaataatattaccattcattactttcataacggttgttttaccaacaccgttttttcctattaatccgacaattctactatcgccaaagtcaaaatcaatatcatttaaaacgacatttgagccgtatttttttgtaatatgttctaatttcatcgactgcctcctttaaattttctagtatttattttattgagctgtttaaaataattaacaataagtataacaatgcttataattagaaaaccaatatttaaaatatatgaatataaatctgggaatgatgattgacttagaacaaaataattcaccaatactattgcaattgaaaataaaaatggaactaaaatgataatagtaaacacgtatataccatatggcactttgactctacgcaattctgtaaattgactaaatgcaattggtatagacaagaagttagatatgacaaatgcatatgcagttgaaaaatagattgaatttggttcaatcacatctgcttcataagcatataaactaataacaagcgttccaattaatgttaaaacaatgcatgtaatatagttggcattaagcaattgtttttttgacactggtaaactcatataaaaataatatgaatcattaccacctaatctacgattgagtctaaataagtgaccagcatctaaaatccaaataatcaatattgttggacttataaaagattgcaataagtaaaagaactttgttgagtcaagcattatataaaaaggatataaggttaataatagaacatagatgataagtgtatatcgtcgtaatttaaaattcctaattaacaatgccttcatttaaaaaccttcttccatcaatttgatgttttcatgatatttaggttttctcttttcaagataaaccattaagttctcaatagaaggtgtagtgatattcactttatgacctaaaatttctttaaatacttgcgcatgttctgttaatcctataaatcccgtacgcttatgttcttcataaataagtagagatgctaattcatcatcaaggtcctcaatagcaccactcacaacttgatatctttgtaacagttgttcttttgaaccatttaagataacttcaccgtcacttaagtgaatgatataatcagctattttttctaaatctgagataatgtgtgtcgacatgaatattgttttattttcatcaattaattcttgctgaattatctccaatagctcatttctagctaagggatcgagacctgaagtaggctcatcaaaaatatacaattcagcatgatgtgaaaatgcaactgctagtgataatttcattttcatcccagtcgaaaatgtttttattgatttattgattggtaaatcgaacttttcaagataaaattcaaatacttgatggtcccatttacgataaaaaggggcaatcattttttcaagttgcttcgtagtccatctctcattaaaataattttcagagtaaacaaacccaattctattctttaactctatcggattgagagccatatcctcttctaatactctaataacaccagtttgtggttgatacaaatccataattaaccttattattgtggttttaccagcgccatttctaccaataaaaccagtgacgaatccttgaggaactttgaaagagatattctttaaattaaactgatcacttgaataattaacattacttaattctatggcattcatgatgattcctcctcataaatgaacgttaaaatatcctgcagttcctcaagtgacatttcgatggcttgcgcttcattaaccaattctttaaccaaattttcaatggtaaaaaattgtttctcttttaaaatagaactatcttgctccttaacaaaggtcccttttcctctaattgttgtaacaaaaccgtctttctctaaatcttcataagcacgtttggtagtaatcaaacttacttgaagatctttggcaagttctctcattgacggcaaatgctctccaggagcaacatgtccctttaaaatattttgttttacttgttgcttaatctgttcataaatcggaaaatcactattgttttttaaaattattttcatcaacgtccccctatcaacttctgtatatatacaatatacacaatatacacagttttgtaaatatgcatgtctcattatcaaccagtcttcagaaataacactgagtattgtattactagcagttgaataaaatgaaatgacactaccatttaatcttgcattgtctacttcaataaaaaagactgctaaaacgaatgtctttaatctctacgtgacaaccgtagcgtcaacataaacaatcgttttaaacagtcaattctatttactatttttacgtcgatcattacttctacttataaaagcacaaatcataaacataatcgctgctaataataattttataccttggctttcatgattagttgcttgtaaataataaccaataataaataaaataattgcaagtactacaaatatttttgttagatgtttcaatttatttcacctcaacatcgacattataacaaatataaatttttttaataagttattgaatttcaaaagttcaaggtactaatcactttcaactaaaatagcgcaacaaaaccattcaatcaaaatgattattgattgcgatatattgtgttcaatgatattatttaagtgtatccacagaattatactacacaaccccaagtctggtaccagcagacttggggttatttatgtgtgtaggatcattttttatttttccatttcagttctaaccaaagtcgaaaaataattagtaagccacctgtaataagtgtcatcatcccttcttgccaccacatcattacactacacctccgttcgactaaagtatcatactgaaggatgacctacacctattctaacataaaaacagaacatatgttcgtattttggcagcagattttacatattattcgttaattcaccaacaacactttatctttggtataattgaagataatatataggcatacaatttttttaaagagaggttaagcaataatgaatcctttagcccaaagcttaaatgaacaacttcaacagtcaaatgcaactgcctttacaatgttatctgacttaggtcaaaatatgttttatccaaaaggcattttatctcaatctgctgaagcaaagagtacaacatataatgcaactataggtatggcgacaaacaaagacggaaaaatgtttgcatcatctttagatgcaatgtttaatgatttaactccagatgaaatattcccttatgcgccaccacaaggcatcgaagaattacgtgatttatggcaacaaaaaatgttgcgtgacaatccagagctatcaatcgacaacatgtcactaccaattgttacgaatgcattaacacatggtttatctttagttggcgatttatttgtaaatcaaggtgacactatcttgttaccagagcataattggggtaattacaaacttgttttcaatacgagaaatggtgcaaaccttcaaacatatcctatctttgataaagacgggcattatactactgattcacttgtagaagctttacaatcatacaataaagataaagtcattatgattttaaattatcctaataatccgacaggttacacacctacgcataaagaagtgactaccatcgtcgatgcaattaaagcattagctgataaaggtacaaaagttatagctgttgtggatgacgcatactatggtttattctatgaagatgtgtatactcaatcattatttactgcattatctaatttaaattcaaatgcaatattacctgttcgtttagatggtgcaacaaaagaatttttcgcatggggattccgtgttgggtttatgacatttggaacgtctgatcaaacaactaaagaagtattagaagccaaagtaaaaggtcttatacgaagtaacatttctagtggacctcttccaacacaaagcgctgttaagcatgtattaaaaaataataaacaattcgataaagaaatcgaacaaaatattcaaacattaaaagaacgctatgaagtcactaaggaagttgtctatgctgatcaatatcattcacattggcaagcctatgactttaactctggatactttatggcaataaaagttcatgatgttgaccctgaagaacttcgtaaacatttaattgaaaaatattcaattggtgttattgcacttaatgcaacagatattcgtattgcgtttagctgtgtagaaaaagaagatatcccacatgtatttgattcaattgctaaagcgattgatgacttaagataattaatttcaaccaataatctgatgagtatgactcggattattggttttttatttttaaaattattccttctttcaaagtatcataagatatattttattcagcaacttgtcaaacactatacctaattagttttatacatctctcctaacaaaatcaaaaaatcggacagatgaaaagtaaaaaactttttctatcagtccgatttattatagaaccaatttatataacttttggcaaatcacttcaaacattcaagcatcacatctctacaaatgtaaaaggcaccccacgattgtgagatgccttattataaaattaaagattagaatttaagttcaatatctacctttttaatgtcagttgctttaaatactctttcatctttatactcagtttttaagtctacatattttgacgaaccatttttaaaatacactttatacactgcgcgttcagcaagtcctatgtcatgtttagttatcccttgatcatttgccattgctgatttaagttttatacttaaatcattaattgtaattttgcttgcattatagaacacaaattcatttgaaactatgttttcaaatttatttattgttactgggaatttcacattattagatttatttatttttttttgatttagtgtattgttttacatcaatatcaatctttttaatatctttggcactaaataaattaggtgtaaagatgtctgattttaaattcactacttgtttctttccatttttgaaatatactgtatattttgcttgtttcgcaaattttaagtcaagatcactgatgcctctttcactttttaatacagatttcactttgtcatttaaatatttgtaactaattaattgtttattcgaaattttaagttttgataaaattggtgttgatgtgccatttactgcaattgtatatggtacatagctatccgctttcgctttagttcctgttttaacatcaatatctatctttttaatatcttgaacataaagcagattcagttggctaatatttgaatttatgttaatcacttttttcgttccatttttaaaatgtactgtgtaagttgctttttttgcatattttaattcacgttccccgatacctctatcatgcttcaatactgatttaacttttttagagatatctttgtagcctacacgtgggtcacctgtaaattttaaatctgataaaattggtgttgatgtgccatttactgcaattgtgtatggtacatatctgtctgctttcgctttagttcctgttttaacagtaatttcaattctcttaacatctttcgcatgaactaagtttgctgtgtaattttttgaattcaactgtaagattcttttaccaccatttttaaaataaacagtataataagctttcttagcatattttaaatcttgttcactaatacctctatcatgcttcagtactgattttatttgactagttaaatttttgtaatttgtccaaggtttatttgaaaatgaaagattcgataaaatgtttgtagatgtaccatttaaattaattgaatatggaacttgatagtttcttttagctttattttcgatatgtttttttgtatctacgttaatattgatacttttaatatcacttgaatttattaaattcgctgtgtaaatacctgatttcaaatcgataactttcttcgttccatttttaaaattaactgtatatttcgcttgcttcgataatcttaaatcaacatcggtaatacctctatttgattctaaaactgatttaactttatcctctaaatctttgtaactaatattttgattcttattaaatgttaagtttgataaaatattttggcttgtaccgttcacagtgattgtgtatggaacttggtaatttgctttatctttctttttatcttcaacttgctttttagtatctacgttaatattaatagctttaatttcacttgtattaattaaatcagctgtgtaaatacctgctttcaaatcgataactttctttgttccatttttaaagtaaacagtatatttcgcttgcttcgatagtcttaaatctatatcactaatacctctgtctgattttaaaactgatttaactctatcctctaaatctttataactaatattttgattcttattaaatgttaagcttgataaaatattttggcttgtaccgttcacagtgattgcatatggaacatggactttagaatatccatggtgtaacgaacttgatgatttatctaatggcttagctgcggcagacgcttcattattattaaagtttgcacctgttgatgctaaaacacctaatgctaaagttgttgtaatcaatgacttaaatttcataaattatctctccttttttgtgtaattcgtatttgcaacttaattatagccagactttctctattttttgaattaactgaatattaataataaattatctttaacaataattttttaacactgttaaaagttcttttaattttgattaactaattaatttacaatacctaaaatgttgtttggttttgtttataccaagcttcaaacttaaatgtcataacaacattcatttcttaattcctattagatttgtcgattatatttacagcatctttatactcaaaaaacatttacttaaaaatataaattcgatttaataattaatttaaatttagttaatcaattttgcatctattttgttgtaagctatataaaaggagtgataatgatggtgaaaaaaacaaaatccaattcactaaaaaaagttgcaacacttgcattagcaaatttattattagttggtgcacttactgacaatagtgccaaagccgaatctaagaaagatgatactgatttgaagttagttagtcataacgtttatatgttatcgaccgttttgtatccaaactgggggcaatataaacgcgctgatttaatcggacaatcttcttatattaaaaataatgatgtcgtaatattcaatgaagcatttgataatggtgcatcagacaaattattaagtaatgtgaaaaaagaatatccttatcaaacacctgtactcggccgttctcaatcagggtgggacaaaactgaaggtagctactcatcaactgttgcagaagatggtggcgtagcgattgtaagtaaatatcctattaaagaaaaaatccagcatgttttcaaaagcggttgtggattcgataatgatagcaacaaaggctttgtttatacaaaaatagagaaaaatggtaagaacgttcacgttatcggtacacatacacaatctgaagattcacgttgtggtgctggacatgatcgaaaaattagagctgaacaaatgaaagaaatcagtgattttgttaaaaagaaaaatatccctaaagatgaaacggtatatataggtggcgaccttaatgtcaataaaggcactccagagttcaaagatatgcttaaaaacttgaatgtaaatgatgttctatatgcaggtcataatagcacatgggaccctcaatcaaattcaattgcgaaatataattaccctaatggtaaaccagaacatttagactatatatttacagataaagatcataaacaaccaaaacaattagtcaatgaagttgtgactgaaaaacctaagccatgggatgtatatgcgttcccatattactacgtttacaatgatttttcagatcattacccaatcaaagcctatagtaaatagtgctcaactaactaataacttgcttcgttctaaaaggacgaagcgagttatattgttaaaatttgaattgacttacattttaataaaatcatcttaacaactttaatttttcattaatacaagtctttactctacactcaaacaagattcatacactgcacgtcataataaatctatctattcaaatataaataaaagttacctactacattctatgtagcaggcaacttttattacttatttcttttcattatcattaagtacttttacaaacttcacattatgtgtcttccaatcaacttcatataatgctgataatttttcttcttttttatctacatggttttcaccagaccaatagccccagaaaccatggcgattccaatctattttaaactcatccattgatcttttataatgaacaacaaattgtgatttacctttgtcttttttatcatgtgacataacagctaaaaattctggattaaacccttcagacacagttacaggcattttgtctttaggtgtgaaattatctttcgcccataaatttccatttcgtgttaaagaaaaaatttcacttttagttctattatcactatcattagttaattgtctcgtatggtcatgtcccatattatttatcaaatgtgcttctactttccaacctacacctttatgtgacgtagattgatcaagtaatgtacgatatgatggttgttgataactaatcgtctctgaataattactctcttttgtaatatttccagttaagcctccacgattaatcgaaaaatctccacctgttttataaccatacgtatatttaacttctcttgattcatcctgattttttggtgcaaagtcagtcacatttgtattgttgttgtcatcaacattttgaattgaaactgaataagatccaggccatcttaatgtactattccaataaccatttgggtctaaaattctcaaaccactaccaattgtaccttttgctttaataaatactgtttctttatcataattaggttcagttaagaaattaaattgtaagctttgagtaatatttttttgactatcacttgttgtagctgtacgtgtatacattttagtatcaccatcaagattcttctcagaaacttgtttgatttcagaattaatctttgcaaatgaagtagctggtaatacagtgaaagtagtcgatagtgctaacgtacaaattgtgatatttttacatagttgtttaatcattagtaatccgccctttcaatattatccttctttataaggtttattgtcatcagaatatttatcaacgactttaactgttttatttttccaatcaacttcataagtgacaattaatctttgaccatctttatttttttctaaaattggaggtgcataatgtattccaggtctgtttttcaaaatatcttgatttcgtgtgtatgttacttcaaattgcgttttctcatttgacttttcattagataaataagttaaaaattctggattaaagccacttcttactaatgctgggtatctatattttgaagcaaagcttagttcagggttttctacagtagcaattctcgtatttctatagaataataattcatcatttctatttttcacttctccaccatacttcaagtcattcgcaataactgaccagtgtacatgccagttattatttttaccgctggcaattgtgtcataattttgctgattataactaatcgttttggagtagctatttgatgaagttcgtccaataccttttgttgaatcgaatttaccacctgagctatatgaaaatgtactgtctacttttgcagttgaaattttatttttcggcaattggtctaatatttcagttttacgatttctttttacttgaaaatctacatggtactcacttggatactttaaccaatttgaatttttttcttctttatgagattcaaactttaaatttgaatgaattgagccttgttttttaacaagtaatacattcttgtcataagttggatcatcgataaagtcgaattgtaaattttggagtatatttgttttctcatcatatactgtttcagttcgttttgtgattttaccgtttttcccaatatcatccggtgctgttgaatttttatctttattagtaacattacgtttgtctttttgttgagacttatcaacatgttctttcttattttggtcttgagagtctttatgagctgaatttgcttgagtcgttgctgctgataacaataaaattgcacatgataatgatgacgctattaaaacacgttttttatttttcattgttataaccttctttcgtatgattgatatttgttgatatgtatcgacatgtgaataatatcacaaaaacagagaatatatatttaactatttattaaatgattttgttaatattattaaatactttatcctctttaaaaataatgtgtgtacaaagtcattaatttagcaaatatttttatttagtagttaataaccatcgatttgaaatttatatataattattagctaaataatatcctgcatctttctcatacaatttactataaaattaagcatatccgatatcagcgttaataagatcgttgatactagacagttaatttcatagaacgaaatcaaataacacactactttctgcattttaaattatgtttaagaataaaaattatgtttatataaatatatatactactttgaaaggtgtgagcttaatgacaacttttagtgaaaaagaaaaaattcaattactagcagatattgttgaactacaaactgaaaataataatgaaatagacgtttgtaattatttaacagatttattcgacaagtacgatattaaatctgaaattttgaaagttaatgaacaccgcgccaatatcgttgcagaaatcggtaacggctcacctatactcgcattgagtggtcatatggatgttgttgatgcaggaaatcaagataattggtcatatcccccttttcaactgacagaaaaagatggcaaattatatggccgaggcactacagatatgaaaggcggtttaatggctttggtcgtatctctaatcgaattaaaagaacaaaatgaattgcctcatggaacgattagattactggctactgctggcgaagagaaagaacaagaaggtgccaaattattagctgataaaggctatttagacgatgtcgatggcttaattattgctgaaccaactggatctggaatttattatgcacataaggggtctatgtcatgtaaagtaactgcaactggtaaagctgtccatagctcagttccatttattggtgacaatgcaattgatacactgcttgaattttataatctatttaaagaaaaatattcagagcttaaacaacaagatactaaacatgaattagatgttgcgcctatgttcaaatcattgattggaaaagaaatttctgaagaggatgcaaattatgcatctggtcttacagctgtatgttcgattataaatggcggcaaacaatttaactctgtaccagatgaagcttcacttgaatttaacgtaagaccagttcctgagtatgataacgactttatagaatcgtttttccaaaatatcattaatgatgtggatagcaataagctttcactcgatattccaagcaatcaccgacctgtaacaagcgataaaaatagcaaattaattactacgattaaagatgtagcttctagttatgtagaacaagacgaaatatttgtttcagcgcttgtaggcgcaacagatgcctctagtttcttaggagataataaggacaatgttgatttagccatttttggaccaggtaatccattaatggcacatcaaatcgatgaatatattgaaaaagatatgtatctgaaatatattgatatttttaaagaggcttccattcaatatttaaaagaaaaataagaacgatgctgtcagctgccctattcgcgtgctggcagttttttattgcgaattttaagttgatagaaatagcgatgaatattgtttgaatgtaaatattcaaatatcaacaagcacattttcattgattaagtgatgtaaaactgaaattattgtgctgatttgtcatacatatattgactaatggtcatataaaaagatagcttctaatagttacataaaactcgtaaaaaccttctcgtaaaaggaatgggacataaatccctagaaaacagcagctcaacgagctgtaaattatcaaatacatttgaaaaaagctgatttctatcaaataatttatagaaatcagcttttttacattgtctaagaacttaatgtctctgtctctttggaactttatatttcataagtactattttattgtttaaccttttttttaaataaggtataaatctacaatatccaaataagccccatcgattcttataatagtcaaaataattatattcatgtattactcttattgtatttggtaaaatttcattcaatttttttaaatcattgtaaccatatttaaaaacaggttgtgaggataactttgataccgattgatgtctctttgtattattcgcaattgtttttgagcaaaattcaatcgcaaatgtcaaattatgatctcccatctttttgataatagtgtccaataattgagtcattacactctcatcaaaatacatcaatacaccttcaataataaacaatatatctgacttactattaaaaaatttataatttttgacatcatcaatccaactgtaatctagcatagatttagatatcatcttataactattactttctttaaaaaatgtttttcgtatttctattgattctggtacatctaaatctatccatgatattttttctttattaaatctttgaaaccttgtatctaagccacaacctatattgaccacgattaaatctttattatccttgataagcctcttagtaacacaatctattatcacagtacgtatactaattccaatttgagacatgtcatcacatgtaacatttttgtacatatcatctaaaccatcaaatattttttttgatagtgcgtcttttattattggtttttcgttttcgtactcttttgctcgagctatcaaaggaattaacattgattcgggaattccaaccagttgcttcatttaatcactccttaaaaacattagtaccaatgcataagaaaatttttacaacttatttctattattttttatttaaaatttctttttttaatttacttctcaaatgttctaatgtaataggatctgtgaaccaataatcttctgctttatatgaaattacatgtcctttttttacagcttcaatattctgccatgtatgtgttttttcaaaatcaaattttccgtacgaaggtttacttaaaaatatataatcaccagcatatttactaatattttcttttgaaatggaagcatagccttttttatcttcttgtaatttatctttatattgctttgtcattggcataccgaatgcatcatgaacaatatccaaaccacgaccccatgtagagttatatatgtatatttgcttttcatctggttcaaacacagatgctgttgcttgaccaattttactttgaatttcttttttatcttttctagttttatcgtcccactcttcaatccattttttagctttatcttcattattagtcaacttgcctatttcttttaatatttctttatgattgtatttattgtatgtatatgggattgttggcgctattttttggtatttttttatatttttatccatagcatctacaacaattaaatctggttttgctttagcaactctttcaacatcattttctccaatataatcaaccccttttaaataaggttttaaaattgaagaatctttagttatatctgaaacagcaattggtttgattcctaactttataaaatcaccaacataaaatccagttaatacagcaactcttttaggtttctctggtactttcagtgtttcaccattttcaattttatagtctgtagtctttgtcgagttacttgttttatcgacagatgctgaacacgcagtcaaaataaataaattacataataaaattccaattaatcttttcataatatcatccttttgtttttcaattgatattcattttcaattataaaatattaaaagaattagtcaacgcctgttagtaatacacatcagtaacatttctattttcatttatgatattatctaattattaatttataatataaaggagtatgaaattaaaatgaacaaagtccacaaacctttatatttttatttaatgcttttcttctctacaactatcataggtgcacttttattgtatttaccttttactggtaaaaagccaatatcttttttagatgccctatttatagcttcaagtgcatttacagttactggcttgtccccagttgatataggatcacagtttaatatacttggtgagatagtaatactattattaattcaaataggtggtctgggtatcgtgaccgtaaccctattgacactagtatttttaaatagaaagatatcaatgaaaaatagattcttgattatggttacatggaatattgacgaacctggtggtgttattaagctaattaaacacttggctatttatagtttagtcactgaattaattggtatgatttgtttgtgtttatcttttataccaaaatttggtataggcaaaggtttatttttaagcttattcacatcagtatcagcttttaataatgctggatttgccctttttaagaataacttaatagattattctagtgatccaattgtcattattacaatctcaatactcataatatttggaggtattggacattttgtcgtgatagactttattaattgtaaaaaattgagtaaattatctttacattctaaattagtcttaactacaactagtatcctaataattataggagctattacattctttttattagaacagtttaatactatgcaacatatgggactagttgaaaaaatcggaaattcttttttccaatcagtaacaacacgaacagcgggttttaacagtatagatatagcaagcattaacaaatctaccgcattaatgttaatgctacttatgtttattggtggtgcccctctcagtgcagctggaggaattaaaataactacttttgcagttgcgtttatttttgtactaaattatatacgtaaagaaaataatgtttcagtattcaataaagaaatatctgacaaacatataaaactatctattgttaccattaatatctcatttctatttatcagcatcattacttttatattatcgataattaatccgaacatatcattaatcaagttattattcgaagtggtttctgcattcggaacagtagggttaagtatgaaccttaccacagaatatcatggtattactaaaataattattatattcgttatgctttgcggtaaagtaggactattaactttattaagaacatttataccaccaaaaagtcctaaaaattaccgctacactaaaggacaaatttatctataaaataactatccatctttaataagaaatgaactagtgttttaatctattacattaaaaaaactacctaaacaggtagttttttatttattttaggccgattaaatgtcttatgtctttaattaagtaaaatgcacaagtacacctttaaaaagatttactcaaaactaaactatacctagttaaccgcttgtgattaagaaattttaaatgtggtttcttttaattatgtcaaccacccataaggattttaatcaagcactcattcattcctgcactcgcaatatgcattacttatagaagtggatgcactctcatattatggcaataccataactcccgcaccataatgatttaaataccattatgaatctcaattacaaattagcacataaaaaagacgcctcccataagtctagtcaccaaatggaaaacgtctcgtaattaaaatatatttgcgtgcattctaatttgtacttagaatacatcatactcgttcataatgtaattttctaattagtcaaaactatatacagttttacatcattcccggcattatgcactaataaaaacttactttaatacacgctttaaagattattaaatcagcgttttaatttttagacaacgctattatttttagtttttcaattctattatgtcataattatgtcactcaaaaactgttttccaacattgatttattgttggaaaatctcgaaaatctagtctatttctccaacaatcgaagaattatgcccttttttctccctttaaataagtcataatacgaggcatacatgcaacatttacaataaaatatgttcctacatcgtattatacgaatgctcacacttatagttgtttagtaaacccagatgtattgctaacatacccattatcactatatagtttatgtgcagatagtctttcatttctattaccactatttagtgttattgctttacaattcaaccgtttagaaaattcttcagaatcagctaataatctctttccataaccttttttcctaaattcagaatgtataacaaacgcaaggattctcatatactctgcatttttttcgtaaaacatcattttacacataccacttaaaccaattattttattttcttttatcaaaagcagtaggaagtaatcatcatgattcgttattttctttagtctcttttttaaatcattctcatttgttggataacctagatcatcatataatttacatagttgatttaatttttcaaaatcactgttattaaacaatcttgtaattatgctcatataacccaccctaaaaatattatgtacctattgttacatacaatagatacgcaaaatcatttctcactgcaaatcaggacgtttctcagcgtaaacaaatcatttctattcttttgaaaaatatctgcatatcttcacagtaattttataacagattaataaaattaaaaaaaacataacaacaagtattataataaatattataatagctatcgtattaaatagtttagaatatgcaaactgaaaaataaaaatcacaattaaaatactaagtaatgtaaatggtaatagcatcatcagatctttaacattatttctttgttcttgctcccaatcgctaatagccctaaaactactttttttatctataggcgatgtaaaaataccatatattgaaggtgctatacctcctaaaatagcagttcccaaagttgtcattactgaaattactgcgaaagtatcatccgaaagcaataaattcaaactaatgcattgtttattacccatcgaatttattgaccaaatagctagagaaataaacaacccaaaatttaaaataaatgatatagtaatagcaattgtttacaaaacacgaaatttttcatttttatttatattatccatttttctccctttttcttaaatcattttattatatattacaataatcaatctgaaatgttgatgtaatttgaaaaaaatatcatacttttactcctgaaaacctccctaaatcatcaatatgaaaatcagtattaggatattgcgtttacaactcttttaaatctcactcattcttctcatcgtcttaaccgatactatcaataaatactggcaacaccataaaatatatacccaatttataaaaacctaattgactcataatcttctaacggtatatcatccacaatcacagtatgattaggattatcgttagatacatctttcactgccttatctaacccctcatcacctccgtcccattcaccaatattaatgaatataggtacattaccgtttatatcatgcttatctgtaaataatttatgatatttacccaacatatcacgagcttttaaacgatcactaggttttattggtacctctatcagttcaacatgttcattatagactaattgtactttgccactttgtggattttctttatattctccacgcttgactacaacttctttcgtttctgtttcatcaccgactgccgcattcgttagcacatgtaataactcttttgcggttaatacattctcatctataatcttatctttttgttcttgtatatattgcttgatgtgcggctttttcaataacctacacgctgtcacatgtgcgctatttgcgttatatcctgcttttatggcactttgtgttacattcagtgttctaatatactcattcacaaaacgtgcttgctttgcagttaactcactcattttatcacccccacaattttatctaatatggtttcataccataatattacagattgttctgaacaatctaaggcactactaatatcttgataactaagtccttgtataagggagtcaaaaatataaaactctttatcggtcgctaatctgtcaacaatcatttctatgtgattctttataatatgatcattgacattatcgtctgtcatcaattcgtcagaatcttcatcacctattaaaaagaaatcatcagtatttatttcatcatcgccccgttaactagctttgaagtctttagcacacttgcatataccggctgtcgtgctggcgagatactagcattgaagtggtctgatattgattttgaaaacaacacgattagtattactaaaacatattacaatccaaataataacaagaagaaatatcagatacttccccctaaaactgaaagttctatcggtaagatttccgttgacccaaatgtaataaaggtgttgcgtgattataagataaacgttcaaaataattggaaaaacgaattatataatgataaccattgtaatgaaaaaactatcaatgtggatacaaaccattatgtcacgtaccagcatactcaaaaatatctctacgcactcattcagatacacacattgcgcattgctcatagaatcaggtgtacacattaaagaaatacaagaacgattacggcataaagatatcaataccactatgaatatctatgctaaaatcacaaattcatacaaaaaagacgcctcccataagtttagtcaccaaatggaagacgtctcgtaattaaaatatatttgcgtgcattctaatttatacttagaatgaatcatactcgtgcataatgtaattttctagttagtcaaaactataaacagttttacatcattcctggcatgccacccatgttaggttggtcattatttttttctggaattgatgctacaaccgcttcagtcgttaagaacattgctgcaacacttgcagcatgttgtaatgctgagcgtgttactttagttggatcaacgataccttcttctaacatattaacccactcgtttgtagcagcgttaaaaccaacacccggctctgcgtttttcaaacgttctacaataacagaaccttctaatcctgcattttcagcaatttgacgaactggtgcagttaatgctttaagtacaatatttacacctgtttcaatgtcaccttcagcttcaatttcacttactttttggtaaacatttactaatgcagtaccaccacctgcaacaataccttcttcaactgctgcacgtgtagaatttaatgcatcttcaatacgtaatttacgttctttaagctctgtttcacttgctgcacctactttgataactgcaacaccacctgctaatttagctaagcgctcttgtaatttttcacgatcaaagtcagattcagtttcttcaatttgagatttcaattggctaacacgtgcatcaatgctgttttcgtcaccgtcaccatcaacaacagtggtattatctttagttacttctactttacttgcagtacctaacatatcaattgatgcatcttttaaatctaagcctaaatcatcagtaatcacttgcgcaccagttaaaatagctaaatcttcaagcatcgcttttctacgatcaccaaaaccaggtgcttttactgcaacagctgtaaatgtgccacgcatacggtttagcacgatatttgttaatgcatcgccttcaacttcatcagctacaattaagattggacgattagattgaaccacttgttctaataaaggtaagatatcttggaaagacgagattttcttatctgttactaaaatgtatgggcgttctaattcagcaaccattttatctgaatcagtaaccatatacggtgattgataaccacgatcaaattgcataccttcaaccacttctagttcagtgtttagtccatttgattcttcaattgtaatgacaccatcgttacctactttttccatagcttcagaaatataacgtccaatttcttcatctgctgctgaaatcgcacctacttgcgcaatttcatttttattttcaactttttgagaattttcatgtaacgcttcaacagcaactttaactgctttgtcgataccttgtcgtaaaccaactgggttcgcaccacttgtaacatttttcaagccttcttgaatcattgcttgagctaatactgttgcagttgtcgtaccgtcaccagcaatttcatttgtcttatttgcgacttcttgaactagtttagcccccatattttcatatggatcttctaattcgatttctttagcaatcgtcacaccatcattcgtaattaaaggtgctgtaaactctttatctaatacaacattacgtcctttaggaccaatcgttactttaactgcatttgcaagttggtcaacaccacgtaacattgcttgacgtgcatcttcagagaatttcaattgtttaaccataaatgataaacctccatttgtttagttgtgtttcattttcgttctatttaatttatttatgaattaagttctgtattattcaataactgctaaaatatcttcttcatttaataccagatatgtttcattatctcgtttaacttctgtaccagcatattgttggaacacgacacggtccccttctttcacttcaggagtcactcttgtaccatcatttaataggcgtccagttcctactgcaacgataacgccttcgtttgatttttctttagcactatcagttaaaacaataccacttttagttgtttgttcttgttcttttttctcaataatcacacgatttccaattggttttagcatgattgttcctccttaaaaaacctaaagtttagcacttaacattaaagagtgctaacatacatttataataatcaaatttggtcaaaatttcaagtcataaccttttaattaagttttgtaacttcaagttatttacgataaaataaattataaacaaatatttggaggaaaattatgacaagattatgggcatcattgctaactgttattatttatatattgtctcaatttttaccgcttctcattgtaaaaaaattaccatttgtacaatatagtggcatagaactgactaaagcagtcatttacatacaacttgttctatttttaatcgccgccacgacgattattttaattaatttaaaaattaaaaatccaacaaaattagaattagaagttaaagaacctaaaaaatatatcattccatgggcattgcttggatttgcattggtaatgatttatcaaatggtagtgagcattgtattaacgcaaatttatggtggacaacaagtaagtcctaatacagaaaagctaattattattgctcgaaaaatacctatatttatcttctttgtatctattattggtcctttattagaagaatatgtattcagaaaagtaatctttggagaattatttaatgcgattaaaggtaatcgtatcgtggcatttattattgctacaacagtaagttcattaatatttgcattagcacataatgatttcaaatttattccagtttattttggtatgggtgtcattttttcattagcatatgtttggacaaaacggcttgctgttccaattattatccatatgttacaaaacggatttgtcgttatattccaattacttaatcctgaggctttgaaaaaagccacggaacaagcgaattttatatatcacatttttattccataataaaaaaaacgaatcacacacggattatcgtcgctgtgattcgtttttatttttctttttatttcgctttacaaataagaatagcatgattgaaaataccaccatcatagaacatacaattgctagccaacttttactatatgcagttgacgcacttttcttattatcttcttgttttttaactactgtaaaatcgtctttttcatgcggttcaaatgagcgttgttttgaatccggcttatcttcgggctttttcaaatctggcattgatccaatttcaccagtaattaatgcgagtacttgttcatctaaattacgatagtacctttctgatttcaatggattgaaatattggaatctaaagtaattcgattgctgttgtaatccatttaaatatgcatttccgctgaaattttgttttcgaataatattataaatgtcttcatcagtaacttctccataatctttgcccaacttattaatttgatttaaaatatacggattatacttgtaagccccatttgccaaggctaaaaatcgttgggatacaaaatcattaccagtaggattttgtgagtttccttgattcccatttggttgccattgaccttgattagatccatctgaagcatttgggttccatgtccccccatttttcgagccaccagaatgattggaatccccaggttgatcgggatctggtgacgggttaggatttggcttattagggtctggttttggattcggatttggctttggtttatctggatctggttttggatccggatttggctttggtttatctgggtctggttttggatctggatttggtttcgggttatctggatctggttttggatccggatttggctttggtttatctgggtctggttttggatccggttttggtttcgggttatctggatctggtttaggattcggacttgagttttggttatttgggtctggttttgaatctgtacttgggttttggttgtttgagtctggcttcacattattcgaatcaggattagcatcacgactattcgaacctgttccttcattacccgtttgatttgattcgtgaggtgtcccagtctcattattattcatttcactatttactgatggtgaagttatattatgattcaaattagtagttggtttttctccatttaagttatcctttgcttcaactgtgtgcgttgcaagccctaaactactactacttaaaattaaaatacttgttgaaagtaacattttcttaaaccaatgatatgacatttcacgagacacctccctttttcatgtaagtattaatctaagtataataaatatgcgttgaaaatgcatttatatttggaatttgaaaatgaatattaatattcttgaaattttcgtaaatattgctttacaagtacgagtataaattttatacttagtctattaagtattctttactaaagaaggagcaataattatgggcttatttaaaaaagataaaaaagcaatgacttttgacaatgcaatggaagaaagacgttcaatatataatttgaaagattcgatatcaattagcgatgacgaattagaatcaatgattgcacatgcagttaaacatgttccttcatcatttaattctcaatcaactagaattgttctcttgttaaatgacaacaataataaattttgggataacacaaaagcaattttaaaagaagtcatgggagagaatcgtgatttcgagccaactgaacaaaaaattgataacttcaaacattcatacggtacaattttgttttatgaagatcaagatgttgtaagtggtttacaagaacaaatgccaaactactatgataattttgcaatatggtcaactcaaacaaatgccatgcatcaatttgcaatttggactgcattagctactaaaggcataggtgcttcattacaacactataatccacttgttgatgagatgacttcaaatgaatttaatattcctaaaagttggaaacttattgctcaaatgccatttggtgatattcgtgaagctgctggcgaaaaaacatttaatccagtggaagatcgtttcgtaataaaaaaataatcaatatattgttaggaatgggacagaaatgataaagaatcattagttattcattatgtagtagttcttacacattagccgctgctaatgtgcacttaagaataggaatacatgagtaaaactcatgtataagaaatactaatttctaaagaaaaagtatttctttatgttagagcccaccccaacttgcattgtctgtagaaattggtgttccaatttctctatgttggggccccatcaactactgtcaatataactttgtagagcctaggactttgattttatgtcttgtgctcgttttttgcgtttcaacataacttttagtaagttatatataagatctatcaaggatgtgatgttatgaaagtccaaatttatcaattaccgattgtttttggagatagttctaaaaatgaaactcaaataacgcaatggttcgaaaaaaatatgaatgctgaagtagatgtagtcgttttacctgaaatgtggaataatggctatgatttagagcatttaaatgaaaaagcagataataatctaggacaaagtttttcatttattaaacatttagctgaaaaatataaagtcgatatcgtagctgggtcagtttctaacattagaaacaatcaaatatttaatacagcttttagtgtgaataaaagtggccagctgattaatgaatacgacaaagttcatttagttcctatgttaagagagcatgaatttttaaccgctggcgaatacgtagctgaaccctttcaattgtctgacggtacttatgtgacccaacttatctgttatgatttacgttttccagaattattaagatatcctgctcgtagtggtgctaaaattgcattttatgtggcgcaatggcctatgtcacgtcttcaacattggcattcattactaaaggcacgtgcaattgaaaataatatgtttgtcattggaactaatagcactggattcgatggtaacacagaatatgctggtcattcgatagttataaacccaaatggagatttagttggagaattaaatgaatccgcagatattttgactgtagatttaaacttaaatgaagtagaacagcaacgcgaaaatatacctgtatttaaaagtattaaattagatttgtataaataagaagcgcccgaaataatatttaacacatgtcatgactaaacatagatttatgagagatttttcataagtctatgtttatttttttataatagataactcagtaagaacccatttcgccctttgcaaatgaatgattttcttaattaaattgattaattttttgaccttttccaacattagacttattcatatattttaacggcgggtctcataatgatgattaactcatcccttcttcattacaaaaaaggccgcgagcttgggaggggctcacgaccatacttattattaagggaatgttttacagttattttttcaatctatttttggggatgttattaattatgaaaaaaattttatttatcaaataatgataaatcgatgttgtttacgatagcttacatgctagaaataattatctgtaatgataattaagaaaaatacatagcactgagtccaaggaaactaactctactagcaaatgttactcacttgctaattttacatggttattaagttgggatggcttaataactcatacttttagtactatacgaagataacaaatttacaatgaaagtaattaattattcatcttattttttagtgaatttgttcactgtgtcgataatccattttactaagtcaccgattgttgaaatgatatcttgtgccattgaaatcactccttccttaattaagataaaaattcttaaaattaaacaactcatcaactattttccatcacatctctgtgatctagttatattaaaacatgctaaaagcatttattttccaatttttcttaactagtcgttttttattcttaactgtaaatttttttatgttaaaatattaaatacaaattacatttaacagttaagtatttatttcctacagttaggcaatataatgataaaagattgtactaaatcgtataatgacagtgaggagagtggtgtaaaattgaattattttgataataaaattgaccagtttgccacgtatcttcaaaagagaaataacttagatcatattcaatttttgcaagtacgattagggatgcaggtcttagctaaaaatataggtaaattaattgttatgtatactattgcctatattttaaacatttttctgtttacgttaattacgaatttaacattttatttaataagaagacatgcacatggtgcacatgcaccttcttctttttggtgttatgtagaaagtattatactatttatacttttacctttagtaatagtaaattttcatattaactttttaattatgattattttaacagttatttctttaggtgtaatctcagtatatgctcctgcagcaactaaaaagaagcccattcctgtgcgacttattaaacgaaaaaaatattatgcgattattgttagtttaacccttttcattatcacacttatcatcaaagagccatttgcccaattcattcaattaggcatcataatagaagctattacattattacctattttctttattaaggaggacttaaaatgaatacattatttaacttattttttgattttattactgggattttaaaaaacattggtaacatcgcagcttatagtacttgtgacttcataatggatgaagttgaagtaccaaaagaattaacacaattacacgaataatttaaatagagagtgtgatagtaggtggaattattaaatagttataattttgttttattcgtattaactcaaatgatattaatgtttacaataccagctataattagtggtattaagtacagtaaacttgattattttttcatcatagtaatttcgacattatcgttatttctatttaaaatgtttgatagcgcgtccttaatcatattaacttcatttattattataatgtattttgtcaaaatcaaatggtattctattttgttgattatgacttcgcagattattctatactgtgctaactacatgtatatagttatatatgcatatatcaccaaaatttctgatagtatatttgtaatattccctagcttttttgtagtttatgtgactattagtatactattctcatatataataaatagagttctcaaaaaaattagcacaccatatctaatactaaacaaaggatttttaatagttatttcgactatcttactgcttactttttcattatttttcttttattcacaaataaactcggatgaagctaaagtaataaggcagtattcttttatttttattggtatcactatatttttaagtatattaacatttgttatttctcaatttctccttaaagagatgaaatataaacgtaatcaagaagaaattgaaacctattatgaatatacattgaagattgaagctatcaacaacgaaatgcgcaagttccgtcatgattatgtcaatatcttaacgacactttcagaatacattcgagaagatgacatgcctggcctacgtgattatttcaataaaaatattgtacctatgaaagacaatttacaaatgaatgctataaaattaaatggtatcgagaatcttaaagtacgtgaaattaaaggcttaattactgcgaaaattttacgtgcacaagaaatgaatattccgattagtatcgaaatacccgatgaagtaagtagcattaacttgaatatgatcgatttaagtcgcagtattggtattattcttgataatgcaattgaggcatcaactgaaattgatgaccctatcattcgcgttgcatttattgaaagtgaaaattcagtaacgtttattgttatgaataaatgcgctgatgatataccacgcattcatgaattgttccaagaaagtttttctactaaaggtgaaggtcgtggtttaggtctatcaactttaaaagaaattgctgataatgcagacaatgtcttattagatacaattatcgaaaatggtttctttattcaaaaagttgaaattattaacaactagccataaggatgtgaatgtatgaaaattttcatttgcgaagacgatccaaaacaaagagaaaacatggttaccattattaaaaattatataatgatagaagaaaagcctatggaaattgccctcgcaactgataatccttatgaggtgcttgagcaagctaaaaatatgaatgacataggctgttactttttagatattcaactttcaactgatattaatggtatcaaattaggcagtgaaattcgtaagcatgacccagttggtaacattattttcgttacgagtcacagtgaacttacctatttaacatttgtctacaaagttgcagcgatggattttatttttaaagatgatccagctgaattaagaactcgaattatagactgtttagaaactgcacatacacgcttacaattgttgtctaaagataatagcgttgaaacgattgaattaaaacgtggcagtaattcagtgtatgttcaatatgatgatattatgttttttgaatcatcaacaaaatctcacagactcattgcccatttagataaccgtcaaattgaattttatggtaatttaaaagaactgagtcaattagatgatcgtttctttagatgtcataatagctttgtcgtcaatcgccataatattgaatctatagattcgaaagagcgaattgtctattttaaaaataaagaacactgctatgcatcggtgagaaacgttaaaaaaatataataagataataaagtcagttaacggcgtattcaattgtaaatcttgttggattttaacaagataactagcaaatgcactgtatagctggctttttaattttattaacaaaattaaatatgacgcgtgaattaaaaaatgatgtaacgtctctttgtatacctattcctattactacataatttatcaatttctatttcactctacaatcctatggcgcaatttttaacaaaatatactaaatttgaaattgacagtttccataaataaaatgctataatttcctactccgtgaatcttattttgttttaaaaaacagtgtagcacaagattcaacttgtttcctacactgttttataaatgaattatttaaaatgcttgttcaacctcttgtaatgttggcaaactattaatagcaccatacttcgttgtcactattgcagcaacgcgattgctaaacgctaaaatttcctcaccttcattttcaaataactgagttaaatttaacacatcggttgctaaaatcctgctaataactgcaccaataaatgcatcccctgccccagttgtatcaacaggttttaccttatagccactatgataatgattaataccatttttcaaatatacggcagcaccatctgctcccttcgtataaatgactacagtaacattacctgtaaataatgattgaatggcttcattttcatcatgaatacctgtaataaattctaattcttcatctgaaacttttacaatatgcgccaatggcaaaaaggtatgaatagtttgtcttaaatcttcagcgttatcccataatggcaatcttacattaggatcaaatacgacagtaccatttgcatttaatgttttggtaatcaattgataatgtgcatctctcatcggactatcgaccaaatcaacagaacaaaaatgtactacatcattttcattcacatcaatatcattcacaaaacttggttcaaataacatatcagcagagggcttacgataaaaagaaaaatctcgctcgcccgcttcagtcaaactcacaaaagctaacgcagtgtttgcttcattcgtgcgatacacttttgatacatctacaccaatacttgatatcgtttcaataatgctatctccaaatgcatcattacctaattgtgtaatcatatacgcttgttgtcctaacttttgaactgtacaagctacattgcatggcgcgccaccaatttgcttcgtaaatgtttgaacatcttttaaattcgcatttgtaacatttggaataaaatcaattaacgcttctcctattgaaaatagacgtctcatttatgttcatcctttaaatcatatttagtaaattgtaaatatacttgccctgattctgttgatgttttaatacctagtgcgtcttctgtcgggaaaattcgagatgtcaaaacacgttctccatcattacagaaaatttctatactagatgtatcaacaaaaatttgtaattgctttaatggcgtgtctaatatcgtactacgcgtcgtaccttcaacatttgtcggcaataaaccactgtcgctgcgatctaatgttattttattttcacgcttgttataagcaattaatgttgaagaagtcttagatgtacgtaattcaaagtacacttcggtagcatcattatccaaaatatctatgattaattcatactgtttaccttcatacggatgtaattttcgagtaaatttatttgcgtagcctaatgctgtctctttattgtgacgtaatttttccaacgctggatatggacgttgcttaagttgaccattttctacatttaatacacgaggaattgttaagcaatgggcccatccttcattatcagtaggatattcgatttccggtaaccccatccatccaattagtactcgtcggcctttttcatctaaaaatgtttgaggtgcatagaaatcaaaaccattatcaagctcgacaaaattttcatgttcatatgttaacttttcaatatcaaactttccaagtatataaccactttgataaatatttttgaactgatcgccttttggttcaataccttgtggacaaataagtatgacatcttgattatctacattaaagtaatctgggcattcccacatatatccaaaatcatccaactctgtatttatttcacctaaataatgccaattaattatatcttcagtattataaagtaataatcgaccttgctgatcattattttgtgcaccaatgattgcataatatttctcatcatatttaaaaactttaggatctctaaaatgactcgtatatccttctggttgttggctaattactggctttggaaacttttcaactgaaccgtcttctttcaatcgtgcgatcatctgactcgcatgtcgttgccaatgattatctcgatgatttcctgtgtacatataatataaatgcccgttatattcaaaagcgctaccgctatatacaccatggctgtcatatttagtatctggatttaaaattggcccttcagctttaaagtttattaagtcatcactcgtgtagttataccaatactttaagccatgtactgcgcctaatgggaaccattgatgtgaaacataatacttccctttataaaaaataagtccgttggggtcatttaataagcctgtttctggttgtatatgaaattgttgacgaaattttgattgatcaacttgttgttttaatgttttaaaatactcagtatcaacgtcctcgattcgttgataacgttcttctctagtccattcggtcataatatttacccagtcctccttttataatttatgctgttaacaatttatattctattatagcaaattttacctacgttctttaacttttaacctatccatttatagttatatggtatcggttccacatttattttaaaaaatacagcgtctaaatattaacatctactgtgacgctatatggcatatcttgctttttaagcatctgttgtatctcttccatcgcgcattggccagcttcaaaataattataatgaattgtttttatcgatggagacactaattgtgtcattgggtcaccaccaaaaccatatatttgatgtggtttcataacatcttttttatcagaataatatttataggcagctaatgcaatcgtatcagttgctccaacaaccgcatctacttgctccacattttccaaaacatttgcaacatctttttgtgcttccacataagtaaaatttgtttcatgtatattaggtttaatttggtatttagctaactggtcaagtaaaccacgttttctatgtataccaactgcaatatctttttcacttacactaaacacttcaacttgttgatatccctgttgaccaatccattcgcctataatttgacctgctttataatcatcatgcacaatactatgaagttgttcatgttgttgaccaacaataacgattggtacattcattttattaatgacttcaatatgtctctctgttatgtctgtagccattaaaacaataccatctactttactgcgtgctaatgtttcaagcgcttgtatttctgcttcgatatttaaacctgtgtaatttaaaattaattgtgattcatatttttggcattgttttgccaatcctttgattgtttcatctactgcatatgaattcattctaggtataatggcaccaataaggtgtgtttgtctcgctcttaaactttgagcaaattgattcggttgatagtcatgttctgctataattcttgttaatttttcacttgtttttttactgacagatccattatttaaaaatctagatactgtactttttgaaacgcctgccaatttggcaatatcagatatatttttcatacttattcacctatcattatttgtgacacttagccttattttagcatatgtgtaaccgctttaaataatatttctgcttctttcataaaaagatttcaaaataaaacttttgtataacaaaatgtcccaacatcaacctttagttaaatgtcaggacaatgaatattctatgtaaatatattctaatatcgaatatgtttattgaatctatttagctcaccttcaaagtaagcatgttcaccgtgaacaatcttgtctaatcctatattcgtttcttgttccgtaacagataatggtgtaattaatttaattactttcgcaataataaacgtcatgactatactaaaaattacaactgctgttacacataatatttgtacaagtataatatgtatgtcaccagtataaataaagccattctcaatgtcaggattggcttttttactttggaaaactgctgttaaaacagcaccaataataccaccaacaccatgaataccaaatgcatctaatgcatcatgatattttagttttaccttgatgtaattaatgacaatataacaacagatacctcctattaaagccattattgttgcactaagatatgttacatatcctgctgcaggagtaatgacaactaatcctgctaatgcaccgagtaaaagtccaagtaaacttgtcgtctttttaaaaatatattctaaaattaaccaacctatagcacctgcactggctgaaatgacagtatttgtaaatgcaagcatcgcaatattatcaaatgtaaaagcactacctacattaaatccataccaaccaatccacacgaatataccgccaatcaacgtaatgataagattatgtggtgttgattcagaatgtttgtttccttttccaatcataatagctaatactaaaccagaaacacctgatgtaatatgaacaaccgtacctccagcgaaatctaatacaccgagtttgttaatccaaccgccgccccaaacccaatgtgctactggactgtatacaagagcagtccatattactacgaataataaataaggaataaacttcattttctcagcgattgaaccagataaaatagaaattgcaatcgtacaaaacatcatttgaaataacataaacaaagcgaaaggaatatgtgggctaatatcttcttgagtcgcaaaacctacatgattaagaaaagtatattcccaatttccgaaccataaattcccattcccaaaactaattgtaaaaccaactgttatccatacaaatgtaacaagcacaattgctgccatactttgcatgacagtattaagcgcatttttagattgaactaacccaccataaaataaacttaatcctggtgtcattaaccaaactaataatgtacacaaaaacataaatatcgtatcgttaagattcatacttaccactccctttttttcataataatctgacaatttataaaaagcaaaaatgcgttaagttttattacatcttttggaataaaatgtgccacactatataaaaatgatttcatgaactaaaaaaaaaaagactacttactcacttttaaattagcggaagtagccatagaatctaatatctattttattgttaaaatgataacgttaaactttttgaattgtaattgtccatgaagcattatcaatttgttcatagtttgttacaggataaccattttctgcagcccaatttggaatggcttccgtcgcttgcgtgcaatcaaaatcaatttttaattcatctccagattgcaatgttgccattttcttttgcgcttcaattaacggaaatggacataccattcctactgtacctaattcgtgtatcataattatttctccttttccaatcacttttatttgatcaacatcatttgcataataatcttctatactatttgcgtttgctgtttaacctttgcagattgttggtgtacttttttcattggacgaacaaagataaaatgactcattgtccatacaccaactatcatcgatgctagcgcaatccatccttgccaagtcatcgttgccgtttcaaccaaaccgttaccgatagaacaaccaccagcaactgacgcaccaaatcccatacatatgccaccaatggcactgtttcgtattgtaatcttgtctggcaatcgccatttaaattctcttgatcctctagctgcaatatatgaaccaatgaaaattcctagaactaaaaagacaccccaatcaataaatttagtttcacctgtaatcaaaaagtgtactaaatttgctgaaggcgttgttatacctaaaccgtcatttcttccagttgatgcactcattggccaagctaagagtgcgataagtccaattacaattgctgcaataaatggatggtatcgtttttcgaaaaggtaatatctaatacctgtataacgttgctttagttttggaacagcaactcgaactttcttattattgagtgttcttacaactagaaaaatggtgattatagttaatataacgactaatccccaaaacggaatgccagttgtttgagacatatcactatttacattcgttggttgattaattttatccattactggctttaaaatccctgttttagtgattgctgcagtaacagcatataatactaatgcaatccaactaccaattagcccttcaccagcgcgataccaagtacctgttgcacatcctccagccaatactattccaattccaaaaataaaagaacctataattgttcccaatattggaaaactatgtgcaggaatttgtaaaatatctgttgccgtcaaaatcaataatcctatactttgaatagtaatagcgattaataatgcatagaacatcttattattcttttgcacatacatatctcgaaagccacctgttaaacaaaatcttgttctttgcatgacaaaacctaagagtcccccgacaattaagccactaaaaatcatccacataatcctaacctctcatttccgataagtttagtatgtattataggtgatgattttcttgttttcaaccttatacacaatatttttgatatttatattatattcatataaggaaggcgattaattacgattcatcattatatctctacgtgttaatttattaacctatactatatttatcaacacaacagtttttcctttcattttcaaacataacagaaaaagcctgagacatacttagtcccagactgttctataattaattaaagatataacaaggttaatcattcaaagctaacatcacatttattcactgtaatttttcataaagaataataatgactgtaattctatacctaagtcaatttgatgtacttgcacatctgaaggcgtattaattctaccaggagtgaagtttaaaatacctttcacaccagcttggacgagttcatctgcaactttctgtgcaactctttctggtgtagttagaatcacaacatctatttcttccttcttcaatgttgttattaattcatcgttatctttaacaataacgttccctattttctggccaataacatcttcttttacgtcaaacgcttctgtaatcgtcatatcgtcatgtattgaaaagttatatgtgagcaaagctttccctaggttcccaactccgacaattgcgattttgatcatgtcactctcgcttagttcagatttaaagaaatccaataaactatctatattatatccgtacccttttttacctaattcgccaaaatatgaaaagtcacgacgaattgttgccgagtcaatttgtaacgcatcgctaatcgcttttgaatttacacgatctatacctttagattttaatgaactgacaaatctataatataacggcaaacgttttaaagttgctcgaggaattttaacttggtcactcattcgctatttcctccttcgtgtttgaatgaattatatctatgtattcaaacgagttagagcgtaattgttagattattaaaaaacaaataattgattacaatgaatacctaaatattatacattattgaattttaaaaataaatatcttagtttcaagacggcgttttatactgtaaaatggttattaatgtaataattacgacttgtttcataagttaataaaatttgagaaagacgaaaggtgaagatcgaatgatacttttacaactcaatcatatatcaaaatcgttcgatggtgaagatatatttactgatgttgattttgaagtaaaaactggtgaacgaattggtatcgtaggaagaaatggcgccggtaaatcaacattgatgaaaattatagctggcgtagaaaactatgattctggaaatgtgtcaaaaattaaaaacttaaaactaggttatttaactcaacaaatgactttaaattctaatgcaacagtttttgaagaaatgtcaaaaccatttgaacatattaaacgaatggaaagcttaatcaaagaagaaacagattggttatcaaaacatgcaaatgattacgatagtgatacatataaaacacatatgtcccgttatgaatctttatcgaatcaatttgaacaattagaaggatatcaatatgaaagtaaaattaaaacagtactttacgggttaaattttagtgaagaagatttcaataaacctatcaatgattttagcggtggccaaaaaacacgtttatctttagctcaaatgctattaaacgaacctgatttattacttttagatgaacctactaaccacttagatttagaaacgacaaagtggcttgaagattatctacgttattttaaaggtgcaatcgtcatcatcagccatgatcgttactttttagataaaatagttactcaaatttatgatgtggctttaggtgatgtcaaacgctatgttggtaattacgaggaatttatacagcaacgggatttatattatcaaaaacgaatgcaagaatatgaaagtcaacaagcagaaataaaacgattagaaacttttgttgagaaaaatattacccgtgcttcaacaagtggaatggcaaaaagtagacgtaagattttagaaaaaatggaacgcattgataaaccaatgttagatgccaaaagtgcaaatattcaatttggctttgaccggaatacaggtaatgacgtcatgcatgtaaaaaatttagaaatcggttatcaaactgcaattaccaaacctatgagtatagaggtctctaaaggcgatcatatagcaatcattgggccaaatggtattggaaaatcgaccttaattaaaactattgctaatcaacaaaaagcgcttaatggcgatattactttcggcgcaaatttacaaattggttattatgatcaaaagcaagcagaatttaaatctagtaaaacgattttagattatgtgtgggatcaatatccgttaatgaatgaaaaagatattcgagcagttcttggacgtttcttatttgtacaagacgatgttaaaaagataattaatgatttatctggtggtgaaaaagcacgtttacaactagcactacttatgttgcaacgtgacaatgtacttattttagatgaacctaccaaccacctcgatatagattcaaaagaaatgttagagcaagcactccaacattttgaaggaacaatactatttgtttcccatgatcgttactttattaaccaattagcaaacaaggtatttgatttaacaattgatggcggaaagatgtatttaggagattatcaatattacattgaaaaagttgaggaagcggaagcgttgaaagcgcaccaagaagaacagtcagttaacgtacaagcacataaaaagtctatggaacaatcgtcgtatcataaccaaaaagaacaaagacgtgaacaacgcaaacttgaacgacaaatatccgagtgtgaaaatgaaatagaaactttagagactactatcttacaaatagacgagcaatttacccaaccagaagtgtataacaatccacaaaaagcaaacgaattagctatccaaaaacaagatagcgaacaaaaattagaacacgctatgtctaaatgggaagaattacaacaaaaactataaaaatatacataactctaactgtaaaatcgctatagttagagttatttttttacaaattttaattttttttattcacaataaaaacgctgatattatagctatccacagacttatcctagttacccacaagtaaattaacactaatcaatcatttattttctgttttcccacctgatatccacaataaatgacgttatcaacaccttttatccacaagttattcactctttgttgataagtacgcatgttctctattgacattgtttttatcaaaattcattgttaagacattttctttatgaaataataataatattgaagtatatttttattattattaaaaataaataaggggatacttatgagcacaaatcaaacatttttaatatttgttatagcaattattctacttacatctgtaataggaattgttggacgatacatgagtcgtcaacgtctattaaaatctatggaaacattatggcaaacgatttctccattagaagcttttatcagaccgaactcacatttcgactatgagtataagctctacaaggaaaaatttgaatcacattcattagttgatgataaaacttggtccgacttaaatatgaatgcaatctttcataagatgaattataatttaacagctattggtgaaatgaagctatatgcctgtttacgtggaatgctttcaattacgaacaaatcattacttagtttatttaatgataatgctgaatttagaaaaaacgtaacatatcatttagctttgattggtaaaactgtttatccaacatttccagaccaaatcacaccggtaaaacgtcaaaatatattgtttctatgcccgtttttaccagttatctcatttgcagttatatttattaattcacaagttggtattttattatttcttatgagttgcctatttaatatcattttatcagcaactttaaagcgtacatatgaggatgacttaaaatctatcttttatgcatccaatgttttaaaacaaggctatactatctcaaaaattaaacatgctccacaacctgaagtcaattttaagcaatttagaacagcacgtcatttaacgagtgttttagctgaagttaatgatgaagatatcggagctatggtaattaaactagttaaacttattttcatgcttgattatgttttatttcattcaattcaaaaaagctatacaacacatatgaatgagcttaaaaattgtttcgattacatagctgaattagataatcattatgcattagcaatgtatcgtagaacgctagaatgttatactgaaccacaaattgatgattcaaatgatggcatagtattctctgagttaacacatccactcatagcagatgcagtagccaatgatttctcactatcacaaaatatactgttaactgggtctaatgcttcgggtaaatcaacatttatgaaatccatagcaataaacattattcttgcatcggctatacaaacagttaccgcaagcaaatttgtatatcaacctggaattgtgttcacgtcaatggcaaatgccgatgatgtgttatcaggcgatagttattttatggctgaattaaaatctattaagcgtattgttgaaattccagataatcaaaaaatatactgctttatagatgaaatttttaaaggtaccaacacaactgaacgaattgccgcttcagaatcagtactatcatttttacatgaaaaatctaactttagagttattgcagcaacacatgatattgagttagctgaactcttaaaacaacgttatgaaaattaccatttcaatgaggtaatagaaaataataacatacattttgattacaaaattaagcctggcaaagcaaatacacgtaatgccatcgaattattaaaaatcacttcatttccagcaaaaatatatgaacgagcaaaagataatgtcccgaaaatttagcatttaactttaaacataaaaacgtcagctatcacatgacagaagactatgaacagtttcaataatgttcatagtaatcatgttaataactgacgtttattttattctgcagaatactcttctaaatctatattgctgtgcccatttaatgctaaatcagcaaatcgaccttgctgatacaaatagtggccggcaacgcctatcattgcagcattatctgtgcataatttaggacttgggatagttaattgaatgtcattgactttgcattgatccgctaaagattgacgtaatcctttattactcgccacgccaccagcaacaattaatcgctgaacaccatattctttacaagcttgaatagctttaaacgtgagcacctctacaacactgttttgaaagctcgttgctacgttagcttcaatgattggaatatttttttgtcgttgattgtgaagttgattgattacggcacttttcaacccactaaaactaaaatcataactatctttatccaaccaaacacgagggaatgaataagtatcttcaccttcagcagccaaccgatcaacttgtggaccacctggataatttaaaccaattgttcgtgccactttatcataagcctcacctactgcgtcatctcgtgtttcaccaatgacttcaaatgataaatgatccttcatataaactaattcagtatgtccacctgaaacaataagtgcaattagcgggaatgttaatggctcttctatgtgattagcatatatatgtcctgcaatatgatgaacaggaataagtggcttatcgtaagcaaatgccaatgctttggctgcattaacacctattagtaacgcaccaattagtccagggccttctgtaaccgctatggcatcaatatcttctattgatacatcggcatcccctagagcctcgtttattgttgctgttataccttcaacgtgatgtctacttgccacttcgggaacgacaccgccaaatcgtttatgactttcaatctgacttaaaactgtatttgataaaatatctctgccattttttataacactaacgcttgtttcatcacaacttgtttcaacagctagtattaatatatctttagtcatttaaattcacccacataaccattgcgtcctcaccttcaccataataatttttacgtttaccaccatattgaaatcctaaattttcatatacatgttgtgccactttattattaactcttacttctaaactcatcacatcacaagtgtgacttgcatagtttattccgtattttaaaagcatttgacctaaaccatagcctctataattatcatcgattgcaactgttgtaatttgagcttgatcgataacaatccataaacctaaataaccaataatttgttgttcaaattctaagacaaaatatttcgcaaagttattttgctctatttcatgataaaatgcgtcaattgtccaagaactgtcattgaaactccgacgctcaagatcaaagacttgtggcacatcttctttagtcatctctctaatgtttaattgttcttttgactgttgatccaatttcgttccgcctcagctaatttatggtatttaggagtaaatgtatgtacgtctgaaggtttatctagcaattgatacatgactgatgcatttggtagctgcgcaatcacttcaccttgtaattcatcttgtaattttacagtatctttcccaatataaataaatggttggtttaaatcttctaaaaaagctcgcaatgcctctatcgacatatattgatcttctaaaatagtcactaattgaccattttgccactggaatatgcctgtataaactgcttgtcgtcttgcatcaaacacaggaaccaataatttatcagtatgatcgattgttgctgccaatgcctttaatgatgaaacaccatataatttaacatctaacgcatacgctaatgttttagcaacagtaacaccgatacgtaagccagtatatgaaccaggaccttcagcaacaataatcgcatctaattgctgtttagctattttgctctgctcaaatagctgactaatcgcaggcattaattgcactgaatgattttgtttagaatccgtagttatttcagctaaaacttcatcgttttgcatcaatgctactgataatggttgattcgatgtatcaatgagcagcgaattcatggataattgcctccttaatttgttcataatgttctccttgcgcgaacaactcaatttgtcttgtattttcagatattgttgaaatgttaatagataaatgcgtcgctggaagtaaatcttttataaattgactccattcaataacagtaattgcctgatcttcgaaaaattcatcaaatcctaaatcttcatcagaatcttctaagcgataacaatccatatgatgcaattttaaatttttacccctatatgatttaatgatgttaaatgtcggggaattaatcgtacgtcttacaccaagagcttttcctataaattgcgttaacgttgttttacctgctcctaaatctccgttaagtaaaatcaaatcaccacttttcaattgctcaactaaaaatatagcaaattgattcatttcatctaaattatttatctttatcaatgttgattctcctatattatgcttttcattcataaaaatgattatccattgttcaatcgtatctaactttatatttaacctttatattgtaacaaatttcaacttaaatttcttatctttgaaacagattatctattcaaagttaattgtaagaaaatttaaaatatttgttgacatactaaagcagatatagtaaattaaatttatcaaatttttagacaattctaactattaaagtgatatataccattcacggaaggagtataataaaatgcttaatcaatatactgaacatcaaccgacaacttcaaatattattattttattatactctttaggactcgaacgttagtaaatatttactaaacgctttaagtcctatttctgtttgaatgggacttgtaaacgtcccaataatattgggacgtttttttatgttttatctttcaattacttatttttattactataaaacatgattaatcattaaaatttacgggggaatttactatgcgaagcgacatgatcaaaaaaggagatcaccaagcaccagcaagaagtcttttacatgccacgggcgcgctaaaaagtccaactgatatgaacaaaccatttgtagctatttgtaactcttatattgatattgttcctggacatgttcacttgagagagcttgcagatatagctaaagaagcaattagagaagccggtgccattccatttgaattcaatacaattggtgttgatgatggaatagctatgggacatatcggaatgcgatattctctaccatcacgtgaaattattgcagatgcagctgaaactgtaattaacgctcattggtttgacggcgtattttacattcctaattgtgacaagattacacccggtatgattttagcagccatgaggacaaacgtaccagctatcttttgctctggtggaccaatgaaagctggcttatctgcacatggaaaagcattaacactttcatcaatgtttgaagcagtcggcgcatttaaagaaggatcgatttctaaagaagaatttttagatatggaacaaaatgcctgccctacttgtggttcatgtgctgggatgtttactgcaaattcaatgaactgtttgatggaagttttaggtctagcattaccatacaacggtactgcacttgcagtcagtgatcagcgacgagaaatgattcgccaagcagcttttaaattagttgaaaatattaaaaatgatttaaaaccacgtgatatcgttactcgcgaagcaattgatgatgcatttgcacttgatatggctatgggtggttcaacaaacacggtactgcatacgttagccattgccaatgaagctggtattgattatgacttagagcgcattaatgctattgccaaacgcacgccatatttatcaaaaatagcacctagttcatcgtattcaatgcatgatgtgcatgaagctggtggcgtcccagcaattattaatgaattgatgaagaaagatggcacgttacacccagatagaatcacagttactggcaaaacgttacgtgaaaataacgaaggcaaagaaattaagaactttgatgtcattcaccctcttgatgcaccatatgatgcacaaggcggtttatctatcttatttggtaatatcgcccctaaaggcgcagttattaaagttggcggcgttgatccatctatcaaaacatttactgggaaagcaatttgtttcaattcgcatgatgaagctgttgaagcaatagacaatcgtaccgttcgtgcaggccacgtcgttgtcattagatatgaaggacctaaaggtggaccaggtatgcctgaaatgttagcacctacttcctctattgttggtcgcggcttaggtaaagatgttgcattaattactgatgggcgtttttccggtgccacaagaggtattgcagttggtcatatttcccctgaagctgcatctggtggaccaattgccttaattgaagatggtgatgagattactattgatttaacaaatcgtacattaaacgtaaaccagcctgaagatgttctagcgcgtcgccgagaatctttaacaccatttaaagcgaaagtaaaaacaggttatctagctcgttatactgccctagtaactagcgcaaatacaggtggcgtcatgcaagtccctgagaatttaatttaatttatttttatattggagatggttaaaatgtctaaaactcaacatgaagtaaaccaaaatattgaccctttaaaaatggctgaatcacttgaacctgaacaactaaatgaaaaaactttaaatgatatgcgttcaggatcagaagtgctagtagaagctctacttaaagaaaatgtggattatttattcggttatcctggtggtgccgtactacctttatatgacacgttttatgatggtaaaatcaaacatattttagcaagacacgaacaaggtgctgttcatgctgcagaaggttatgcacgtgtatctggtaaaactggcgtcgttgtagttacaagcggtccaggtgcaactaatgtaatgacaggtattacggatgcacattgcgactctttacctctagttgtattcactggacaagttgctacaccaggcattggtaaagatgcattccaagaagcggatattctatctatgacttcaccaattacaaaacaaaattatcaagtgaaacgtgttgaagatatccctaaaatcgtacacgaagctttccatgtagctaattctggacgcaaaggtcctgtagtgattgattttccaaaagatatgggtgttttagctacaaatgtggatttatgcgacgaaatcaatattccaggttatgaagttgttacagaaccagaaaataaagacattgacactttcatctcacttttaaaagaagcgaaaaagcctgtcgtattagccggcgcaggtattaatcaatcaaaatcaaatcaattattaacacagtttgttaataaacatcaaatcccaacagttactactttactaggtctaggtgctgtaccttatgaggatacactatttttaggtatgggaggaatgcatggttcttatgctagtaacatggcattaactgagtgtgatttactcattaatttaggtagccgcttcgatgatagattagcaagcaaacctgatgcctttgcacctaacgccaaaattgtacatgtagatattgatccttcagaaatcaataaagttattcatgtagatttaggtattattgcagactgtaaaagatttttagaatgtttaaatgataaaaatgttgagactatagaacacagtgactgggttaaacattgtcaaaataataagcagaaacacccatttaaacttggtgaagaagatcaagtattttgtaagccacaacaaacaatcgaatatatcggcaaaattacaaatggtgaagcaattgttactacagacgtgggacaacatcaaatgtgggcagctcaattttatccatttaaaaatcacggacaatgggttacaagcggtggtttaggaacaatgggattcggtattccttcgtcaattggtgccaaattagctaatcctgataaaacagtcgtatgtttcgtcggtgacggtggtttccaaatgacaaaccaagaaatggcacttttacccgaatatggtttagatgtcaaaatcgtactaatcaataatggaacattaggtatggttaaacaatggcaagataagttctttaatcaacgcttctcacactcagtatttaatggtcaacctgattttatgaaaatggcagaagcatatggcgtcaaaggtttcttaatcgataagccagaacaactggaagaacaattagatgcagcgtttgcttatcaaggaccagctttaattgaggttcgtatttcccctactgaagctgtaaccccaatggttccgagtggcaaatcaaatcatgaaatggagggcttataatgacaagaattcttaaattacaagttgcggatcaagtcagcacgctaaatcgaattacaagtgcttttgttcgcctacaatataatatcgatacattacatgttacacattctgaacaacctgggatttctaacatggaaattcaagtcgatattcaagatgatacatcacttcatatattaattaaaaaattaaaacaacaaattaatgttttaacggttgaatgctacgaccttgttgataacgaagcttaattttaagacaaaggcaatgatgcgctaattagttatagatatatcataggctgctagttaacatctgccactattacaaagttatatttcagaattttcgaaacacaaaatatttaattatttggaggaatttattatgacaacagtttattatgatcaagatgtaaaaacggacgctttacaaggcaaaaaaattgcagtagtaggttatggatcacaaggtcacgcgcatgcacaaaacttaaaagacaatggatatgatgtagtcatcggcattcgcccaggtcgttcttttgacaaagctaaagaagatggatttgatgtgttccctgttgcagaagcagttaagcaagctgatgtaattatggtgctattacctgatgaaattcaaggtgatgtatacaaaaacgaaattgaaccaaatttagaaaaacataatgcgcttgcatttgctcatggctttaacattcattttggtgttattcaaccaccagctgatgttgatgtatttttagtagctcctaaaggaccgggtcatttagttagacgtacatttgttgaaggttctgctgtaccatcactatttggtattcaacaaggcgcttcaggtcaagcacgtaatattgctttaagttatgcaaaaggtattggtgcaactcgtgcaggtgttattgaaacaacatttaaagaagaaactgagacagatttatttggtgaacaagcagtactttgcggtggtgtatcgaaattaattcaaagtggctttgaaacattagtagaagcgggttatcaaccagaattagcttattttgaagtattacatgaaatgaaattaatcgttgatttgatgtatgaaggcggtatggaaaatgtacgttactcaatttcaaatactgctgaatttggtgactatgtttcaggaccacgtgttatcacaccagatgttaaagaaaatatgaaagctgtattaactgatatccaaaatggtaacttcagtaatcgctttatcgaagacaataaaaatggattcaaagaattttataaattacgcgaagaacaacatggtcatcaaattgaaaaagttggtcgtgaattacgcgaaatgatgccttttattaaatctaaaagcattgaaaaataagatagacctacaatgaggagttgttaaatatgagtagtcatattcaaatttttgatacgacactaagagacggtgaacaaacaccaggagtgaattttacttttgatgaacgcttgcgtattgcattgcaattagaaaaatggggtgtagatgttattgaagctggatttcctgcttcaagtacaggtagctttaaatctgttcaagcaattgcacaaacattaacaacaacggctgtatgtggtttagctagatgtaaaaaatctgacatcgatgctgtatatgaagcaacaaaagatgcagcgaagccggtcgtgcatgtttttatagcaacatcacctattcatcttgaacataaacttaaaatgtctcaagaagacgttttagcatctattaaagaacatgtcacatacgcgaaacaattatttgacgttgttcaattttcacctgaagatgcaacgcgtactgaattaccattcttagtgaaatgtgtacaaactgccgttgacgctggagctacagttattaatattcctgatacagtcggctacagttaccatgatgaatatgcacatattttcaaaaccttaacagaatctgtaacatcttcaaatgaaattatttatagtgctcattgccatgacgatttaggaatggctgtttcaaatagtttagctgcaattgaaggcggtgcgagacgaattgaaggcactgtaaatggtattggtgaacgagcaggtaatgcagcacttgaagaagtcgcgcttgcactatacgttcgaaatgatcattatggtgctcaaactgctcttaatctcgaagaaactaaaaaaacatcggatttaatttcaagatatgcaggtattcgagtgcctagaaataaagcaattgttggccaaaatgcatttagtcatgaatcaggtattcaccaagatggcgtattaaaacatcgtgaaacatatgaaattatgacacctcaacttgttggtgtaagcacgactgaacttccattaggaaaattatctggtaaacacgccttctcagagaagttaaaagcattaggttatgacattgataaagaagcgcaaatagatttatttaaacaattcaaggccattgcggacaaaaagaaatctgtttcagatagagatattcatgcgattattcaaggttctgagcatgagcatcaagcactttataaattggaaacactgcaactacaatatgtctctagcggccttcaaagtgctgttgttgttgttaaagataaagagggtcatatttaccaggattcaagtattggtactggttcaatcgtagcaatttacaatgcagttgatcgtattttccagaaagaaacagaattaattgattatcgtattaattctgtcactgaaggtactgatgcccaagcagaagtacatgtaaatttattgattgaaggtaagactgtcaatggctttggtattgatcatgatattttacaagcctcttgtaaagcatacgtagaagcacatgctaaatttgcagctgaaaatgttgagaaggtaggtaattaattatgacttataacattgttgccctacctggtgatggaatcggtccagaaattttgaacggatctctatcattgcttgaaattataagtaataaatataactttaattatcaaatagagcaccacgaatttggtggtgcctctattgatacattcggcgagcctttaactgagaaaaccttaaatgcgtgtaaaagagcagatgctattttactgggtgcaatcggtggacctaaatggacagatcctaacaatcgaccagaacaaggattattaaaattgcgtaaatccttaaatttatttgtaaatatacgccccactaccgttgtcaaaggcgctagttctttatcacctttaaaggaagaacgcgttgaaggcacagatttagttatagtccgtgaattgacaagtggtatttattttggagaacctagacattttaataatcacgaggccttagattctcttacttatacaagagaagaaatagaacgcattgttcacgtagcatttaaattggccgcttcaagacgaggaaaactaacatcagttgataaagaaaatgtattagcttctagtaaattgtggcgcaaagtcgtaaatgaagtaagtcaattatatccagaagtaacagtaaatcacttatttgttgatgcttgtagtatgcatttaatcacaaatccaaaacaatttgacgtcatcgtatgtgaaaacttatttggcgatattttaagtgatgaagcttcagtgattcctggttcacttggtttatcaccttctgctagttttagtaacgatggtccaagattgtatgagcctattcatggatcagcaccagatattgcaggtaaaaacgttgccaatccatttggaatgattctatctttagcgatgtgtttacgtgaaagcttaaatcaaccagatgctgcagatgaattagaacaacatatttatagcatgattgaacatgggcaaacgacagcagatttaggcggcaaattgaatactactgatattttcgaaattctatctcaaaaattgaatcactaagggggagatgtaaatgggtcaaacattatttgacaaggtgtggaacagacatgtgttatacgggaaattgggcgaaccgcaactattatacattgatttacaccttatacatgaagttacttctcctcaagcatttgaaggacttaggcttcaaaacagaaaattaagacgcccagatttaacatttgcaacactcgatcacaatgttcctactattgatatattcaatattaaagatgaaattgcaaacaaacaaatcacaacattacaaaaaaacgccatagattttggggtgcatatttttgatatgggttctgatgaacaaggtattgttcacatggtaggacctgagacaggacttacacagcctggcaagacaatcgtttgtggtgactctcacacagcaacacatggagcatttggtgctattgcatttggaattggaacaagtgaagttgaacatgttttcgcaactcaaacgctatggcaaacaaaacccaaaaacttaaaaatcgatattaatggtaccttaccaacaggcgtctatgctaaggacattattctgcatttaattaaaacgtatggtgttgactttggtacaggctatgctttggaatttactggcgaaacaattaaaaacctttcaatggatggtcgaatgactatttgtaacatggctatcgaaggtggtgccaaatacggcataatccaacctgatgatataacatttgaatatgttaaagggagaccatttgccgataacttcgctaaatcagttgataagtggcgtgagctatattctgatgacgacgcgatatttgatcgtgtaattgaacttgatgtttcaacattagaaccacaagtgacatggggaactaatcctgaaatgggtgttaatttcagtgaaccattccctgaaatcaatgatatcaacgatcaacgtgcgtatgattatatggggttagaaccaggtcaaaaagctgaagacatcgacttagggtatgtttttctcggttcatgtacaaatgctagactatcagatttgattgaagctagtcatattgttaaaggaaataaagttcatccaaatattacagctattgtcgtaccaggttctcgtacagtaaaaaaagaagcagaaaaattaggtctagatactatctttaaaaatgcaggatttgaatggcgtgaaccaggatgttcaatgtgtttaggcatgaatcctgaccaagtacctgagggcgtacattgtgcatctacaagtaatcgaaactttgaaggacgacaaggcaaaggtgcaagaacacatttagtatcccctgctatggcagcagcagcagctattcatggtaaatttgtggacgtaagaaaggtggttgtttaaatggcagcaatcaaacctattacaacatataaaggtaaaatagtccctctcttcaacgacaatatcgatacagaccaaatcattcctaaggtacacttaaagcgtatttcaaaaagtggctttggtccatttgcttttgatgaatggcggtacttacctgatggttcagataatcctgatttcaatcctaacaaaccacaatataaaggggcttctattttaattactggagataattttggatgtggttcaagtcgtgaacatgctgcttgggctcttaaggactatggttttcatattattattgcaggaagtttcagtgacatattttatatgaattgcactaaaaatgcgatgttgcctatcgttttagaaaaaagtgcccgtgaacatcttgcacaatatgttgaaattgaggtcgatttaccaaatcaaactgtgtcatcaccagacaagcgtttccattttgaaattgatgaaacttggaagaataaacttgtaaatggcttagatgacattgcaatcaccctacaatatgaatcattaatagaaaaatatgaaaaatcactttaagggagttgaatattatgacagtcaaaacaacagtttctacgaaagatatcgatgaggcatttttaagacttaaagatattgtcaaagaaacacctttacaattagaccattacttatctcaaaagtatgattgtaaagtctatttaaaacgagaagatttacaatgggtacgttcttttaaattaagaggtgcttacaacgctatttctgttttatcagatgaagctaaaagtaaaggtattacatgtgcaagtgcaggtaatcatgctcaaggtgttgcctatacagctaaaaaacttaatttaaacgctgttatctttatgccagtcactacacctttacaaaaggtaaatcaagtaaagttctttggaaatagtaacgttgaagttgtactcactggtgatacatttgatcactgtttagctgaagctttaacttatacaagtgaacatcaaatgaactttatagatccattcaataatgttcatacaatttctggacaaggtacgcttgctaaagaaatgctagaacaagcaaagtctgacaatgttaactttgattatctatttgccgcaattggtggtggcggtttaatttcaggtattagtacttactttaaaacctattcacctaccacgaaaattataggtgttgaaccttcaggtgcaagtagtatgtatgaatctgttgtggtaaataatcaggtagtcacattgcctaatatcgataaatttgtggacggtgcatctgtagctagagttggcgatattacatttgaaattgcaaaagaaaatgtagatgattacgttcaagtagatgaaggtgcagtttgttctacgattttagatatgtattcaaaacaagcaattgtagcagaacctgctggcgcattaagtgtaagtgcgcttgaaaactataaagatcatattaaaggtaaaacagtggtttgtgtcattagtggtggtaataatgatattaatcgaatgaaagaaattgaagaacgttcattactatacgaagaaatgaagcattactttatcttaaatttccctcaacgtccaggtgcattgagagaatttgtaaatgacgtattaggacctcaagacgatattactaaatttgaatacttaaaaaaatcttctcaaaatacaggtactgtcattattggtattcaacttaaagatcatgatgatttaatacaactcaaacaacgtgtaaatcatttcgatccttccaatatttatattaatgaaaataagatgttatattcattgttaatttaacacatagtaagaaaaacagtcataaattgatttctaattgaaatcatcttatgactgctttttattatactttacatttctcgtttcgtcagattcaaacgttttcacttcgccaagccatctttctttgtgtttgcttttattttgacgttttagacataaaaaaagagaccttgcggtctcaatgcggctcatcgcatccactttttgcctggcaacgttctactctagcggaacgtaagttcgactaccatcgacgctaaggagcttaacttctgtgttcggcatgggaacaggtgtgacctccttgctatagtcaccagacatatgaatgtaaattatacattcaaaactagatagtaagtaaaagtgattttgcttcgcaaaacatttattttgattaagtcttcgatcgattagtattcgtcagctccacatgtcaccatgcttccacctcgaacctattaacctcatcatctttgagggatcttataaccgaagttgggaaatctcatcttgaggggggcttcatgcttagatgctttcagcacttatcccgtccacacatagctacccagctatgccgttggcacgacaactggtacaccagaggtatgtccatcccggtcctctcgtactaaggacagctcctctcaaatttcctacgcccacgacggatagggaccgaactgtctcacgacgttctgaacccagctcgcgtaccgctttaatgggcgaacagcccaacccttgggaccgactacagccccaggatgcgatgagccgacatcgaggtgccaaacctccccgtcgatgtgaactcttgggggagataagcctgttatccccggggtagcttttatccgttgagcgatggcccttccatgcggaaccaccggatcactaagtccgtctttcgaccctgctcgacttgtaggtctcgcagtcaagctcccttatgcctttacactctatgaatgatttccaaccattctgagggaacctttgagcgcctccgttaccttttaggaggcgaccgccccagtcaaactgcccgcctgacactgtctcccaccacgataagtggtgcgggttagaaagccaacacagctagggtagtatcccaccagcgcctccacgtaagctagcgctcacgtttcaaaggctcctacctatcctgtacaagctgtgccgaatttcaatatcaggctacagtaaagctccacggggtctttccgtcctgtcgcgggtaacctgcatcttcacaggtactatgatttcaccgagtctctcgttgagacagtgcccaaatcgttacgcctttcgtgcgggtcggaacttacccgacaaggaatttcgctaccttaggaccgttatagttacggccgccgtttactggggcttcgattcgtagcttcgcagaagctaaccactcctcttaaccttccagcaccgggcaggcgtcagcccctatacatcaccttacggtttagcagagacctgtgtttttgataaacagtcgcttgggcctattcactgcggctcttctgggcgttaaccctaaagagcaccccttctcccgaagttacggggtcattttgccgagttccttaacgagagttcgctcgctcaccttagaattctcatcttgactacctgtgtcggtttgcggtacgggcacctattttctatctagaggcttttctcggcagtgtgaaatcaacgactcgaagacacaatgtcttctccccatcacagctcagccttaacgagtaccggatttgcctaatactcagccttactgcttagacgtgcaatccaatcgcacgcttcgcctatcctactgcgtccccccatcgattaaaacgattataggtggtacaggaatatcaacctgttatccatcgcctacgcctgtcggcctcagcttaggacccgactaacccagagcggacgagccttcctctggaaaccttagtcaatcggtggacgggattctcacccgtctttcgctactcacaccggcattctcacttctaagcgctccacatgtccttacgatcatgcttcaacgcccttagaacgctctcctaccattgtccaaaggacaatccacagcttcggtaatatgtttagccccggtacattttcggcgcagtgtcactcgactagtgagctattacgcactctttaaatgatggctgcttctaagccaacatcctagttgtctgggcaacgccacatccttttccacttaacatatattttgggaccttagctggtggtctgggctgtttccctttcgaacacggaccttatcacccatgttctgactcccaagttaaattaattggcattcggagtttgtctgaattcggtaacccgagaggggcccctcgtccaaacagtgctctacctccaataatcatcacttgaggctagccctaaagctatttcggagagaaccagctatctccaggttcgattggaatttctccgctaccctcagttcatccgctcacttttcaacgtaagtcggttcggtcctccattcagtgttacctgaacttcaacctgaccaagggtagatcacctggtttcgggtctacgaccaaatactaaacgccctattcagactcgctttcgctacggctccacatttactgcttaaccttgcatcaaatcgtaactcgccggttcattctacaaaaggcacgccatcacccattaacgggctctgactacttgtaagcacacggtttcaggttctatttcactccccttccggggtgcttttcacctttccctcacggtactggttcactatcggtcactagagagtatttagccttaggagatggtcctcccagattccgacggaatttcacgtgctccgtcgtactcaggatccactcaagagagacaacattttcgactacaggattattaccttctttgattcatctttccagatgattcgtctaatgtcgtcctttgtaactccgtatagagtgtcctacaaccccaacaagcaagcttgttggtttgggctcttcccgtttcgctcgccgctactaagggaatcgaattttctttctcttcctccgggtactaagatgtttcagttctccgggtgtgccttctgatatgctatgtattcacatatcgataacatgacataactcatgctgggtttccccattcggaaatctctggatcaaagcttacttacagctccccaaagcatatcgtcgttagtaacgtccttcatcggcttctagtgccaaggcatccaccgtgcgcccttaataacttaatctatgtttccaccatttttataagtcaaacgctcacatacggcttcgttttcattattttaaatgctcatttacataagtaaactctgctttaaaataatttaactcattgtctgctaaacgttttcttttataaaaagatttaaacgcgttattaatcttgtgagtgttctttcgaacactagcgattatttcttatgaattcaagcttatttaaaactctttattcactcggttttgcttggtaaaatctatattttacttacttatctagttttcaatgtacaatttctttttagtcaagcgctcgcatactgctttattttcaaaaaatcaaatgctcatttacaaaagtaaactccgctttaatttttcttaatgcattgtctaacaaccgctttctttaaaaagaatagattgtcaagcgctcgcataagcaatatcactttaaccaaaaaatatttgaatgttaaataaacattcaaaactgaatacaatatgtcacgttattccgcatcttctgaagaagatgttccgaatatatccttagaaaggaggtgatccagccgcaccttccgatacggctaccttgttacgacttcaccccaatcatttgtcccaccttcgacggctagctcctaaaaggttactccaccggcttcgggtgttacaaactctcgtggtgtgacgggcggtgtgtacaagacccgggaacgtattcaccgtagcatgctgatctacgattactagcgattccagcttcatgtagtcgagttgcagactacaatccgaactgagaacaactttatgggatttgcttgacctcgcggtttcgctgccctttgtattgtccattgtagcacgtgtgtagcccaaatcataaggggcatgatgatttgacgtcatccccaccttcctccggtttgtcaccggcagtcaacttagagtgcccaacttaatgatggcaactaagcttaagggttgcgctcgttgcgggacttaacccaacatctcacgacacgagctgacgacaaccatgcaccacctgtcactttgtcccccgaaggggaaggctctatctctagagttgtcaaaggatgtcaagatttggtaaggttcttcgcgttgcttcgaattaaaccacatgctccaccgcttgtgcgggtccccgtcaattcctttgagtttcaaccttgcggtcgtactccccaggcggagtgcttaatgcgttagctgcagcactaaggggcggaaaccccctaacacttagcactcatcgtttacggcgtggactaccagggtatctaatcctgtttgatccccacgctttcgcacatcagcgtcagttacagaccagaaagtcgccttcgccactggtgttcctccatatctctgcgcatttcaccgctacacatggaattccactttcctcttctgcactcaagttttccagtttccaatgaccctccacggttgagccgtgggctttcacatcagacttaaaaaaccgcctacgcgcgctttacgcccaataattccggataacgcttgccacctacgtattaccgcggctgctggcacgtagttagccgtggctttctgattaggtaccgtcaagatgtgcacagttacttacacatatgttcttccctaataacagagttttacgatccgaagaccttcatcactcacgcggcgttgctccgtcaggctttcgcccattgcggaagattccctactgctgcctcccgtaggagtctggaccgtgtctcagttccagtgtggccgatcaccctctcaggtcggctatgcatcgttgccttggtaagccgttaccttaccaactagctaatgcagcgcggatccatctataagtgacagcaagaccgtctttcacttttgaaccatgcggttcaaaatattatccggtattagctccggtttcccgaagttatcccagtcttataggtaggttatccacgtgttactcacccgtccgccgctaacatcagagaagcaagcttctcgtccgttcgctcgacttgcatgtattaggcacgccgccagcgttcatcctgagccaggatcaaactctccataaaaattatgatgtttgattagctcataaatactaaataatgtttgtaacttatagttacgtttttggaattaacgttgacatattgtcattcagttttcaatgttcattaaaattatctatggagcgggtgatgggaatcgaacccacaacatcagcttggaaggctgaggttttgccattaaactacacccgcttatttaaattaagaattttgatgcggccgagaggacttgaacctccacgggatttctcccactaggccctcaacctagcgcgtctgccattccgccacgaccgcggatataggcatttaaaacatcttcgtttttcagaacgttatttattatattatgtttaaaaatatttgtcaataacttttaatcgtttttttacattaaattaatttgtgttatcagttgttaacacaacgctatttataataaaacatttagaacttattgtcaacatattttataaattaaatttagaattgactgtctttcaaatcaaagtttatttaatttgttcttttttaaggaacgtgtttaatcatactaactataagctgtacagtcaatagaaaagttcaatcaaaatgtcatgaaaaatgtataattatcttttgtgctactttaaagctttaattgggtaaagtttatatattaattattactaaaatacgccaagatttttaatctaatcattttaatttcatcctatcaagccacaatttatgccattacctatatcataagtagaaaagccgagattgcgaagtattaaattacgacaatctcggctttaaacattttataaacacaatttcttcttattcaattactatgtttaccaatcaaaataactcactgataaattctatataaattccatacaactcataaataatcttacatatacacgaattagctctatttgtattgtacttatttcaattgtcttttcattcttaattttccattgcaatgtccgcaacgcatacgattcgtatcaactttacggatacgtatatattttgcatgacatttagtgcaataatattcataatttgcccgttgttgatagctttcaatgctgttacaaaatctaggcgctccaacctgttggctcaatcgtttaaaatcttgatctttatgttgataacctttaccagcaatatgcaagtgataatgacacaattcgtgcagtataatttttacaacagcatcttctccataatgctcatattgttttggattaatttcaatatcatgggactttaaaagataacgtccgcctgttgtacgtaaccttttattaaaatatgcacaatgtcgaaacgtacgtccaaatttttcttccgaaagattctcaaccattcgctgaagtttgtcattattcatgtggatcaatcatcgttaatgatactttgtctttatttttgtcaatactgtaaatccaaacgtcaacgatatcaccaacactgacaatatccattggattttttacgaacttcttagaaagtttcgaaacatggacaagtccatcttgtttaacacctatatctacaaatgctccaaaatctactacatttctaactgtaccactcaatttcattccttcttgtaaatcttcaattgatagcacatcggatttaaggattggtgtttcaaactcgttccttggatctcgattaggtgctttcaaggatttaataatatcctctaatgtaggtacaccgacttgtaattcaatcgccagttcatccatatccaatgaatttaatttagcttttaatgcatcactacctaaatcattgccaccaaatccgagtttatctaataactgatacgttactttatagctttcgggatgaatcgatgtattatccaatggctctgaaccgtctactattcttaaaaatcctatactctgctcaaaagttttagcacccaaacgcttaatcttgcttaactctttattatgctttattgcgccattttcttctctatatgcaattatatttttagcaatttgcgaacttagaccagacacatattgtaataatgatgatgatgctgtattgacatcaacacctacttggttaactgctgtttcaacaacgaaagttaatgcattttctagtgctttttgattaacatcatgctggtattgtccgacaccaatagatttaggatcgattttaactaattcacttaatggatcttgaacgcgtcgtccaattgatacggcacttctttcttccacttgaaaatcaggaaattcatctctagcaatttctgatgctgagtatactgaagcgcccgcttcattgacaatgatgaattgtactggcaactgatgctttttaattaaatctgcaacaaattgttctgtttcacgacttgcagtaccattgccaattgcaattaattgcacatcatacgctttaaccatttgtacaaaatccttctctgctgcctcttttttagaaactggtggatgcggataaatcacaccttttgctataaaagtaccgaatgggttaatgactgctaatttacaacctgttctaaatgctggatctacgcctaatatttgtttacctttcattggaggttgcagtaatagatttcttaagttttcactaaaaacatctattgcatgattttcagctttttcagttaaatcagcatggatttcacgctctatcgaagggacaattaagcgtttcaagctatctttaatcgcctctaaaatataactgcgatttacattattatgattgatttcttgacgtgcaatgaaatcctctactgatgtcgtatcgaattcaaactttacagataatactttctctttttcaccacgattaacagctaaaactctatgattagcaatgcgtttaattggctcactatatgcatagtacatttcaaaaatacctttttcatcttcagcatttttctttttagatgtagttaacacaccttgatgatacatatcttttaaaatttttgttctatatttaggattatctgaaatttgttccgcaataatatcttgtgcacctttgatagcatcttcaaccgattgcacttcttcatttataaattgttgtgctttttcttcaattgagacttcatgtttacgtgccttcatccatatcgctaatggctctaaccctttacgtttcgcctcagttgcccttgtctttttcttttgtttaaaaggcctatataggtcttcaacacgttgtaatttgttctgttttaaaatatccttctttaattcctcagtaagtaatccttgctgttctatatttttgataacttcttctttacgtttttgtaaattgaccatatattggtattcgtcatcaatttgctttatttgaacttcatctagtccaccagtttgctcttttcgatacctcgcaataaatggtactgtatttttttcttctagcagtgttaatactgcttcaatttgttttttactaaattgatatttctctatgattgaattaatcaattgattgtccatttacttaacccacactttttcttaaatttactcatttattttaacatattctaaaatacttctattaagatatgatacttaatgtaattttcacttccaaaacatttaaaacgaatgattaggtcatactatattttaaaacgcactaagattattgaaaatgacacaccatcatttctaaatttcataatctaagactactttttttattctaatagcaacccacctatttaaaacgacaattagatatcttcttcacttaaattattaatactatatcgcgacatttatgtggatacacattaaactacactaataatgtattaattcgaaaatcttaattaaattaaaaatacccctcgatttcaatttaataatcaagggataattatatggatttttcattataaaacgtatcattaataaacaaattctattgatgtgctgcttcttgtaatttcttaattgccgttctctgaagtcgtgatacatgcatttgacttaaaccgatacgctcacctgtctctttttgactcaatccttcaataaacgtacattgtatgatttctcgttcgcgatcagataatataggtaatattttttctaaaatcatacgtttttcagttaagtcataatggtcatcttgttgccccataatatctaatagcgtaacagttgaaccatctttatcagcttcaatggaatgatcaacacttaacgcattataactttgtcccatttccattgcttctaacacttcttcttctgagacttctaatcgatcagctatttcactgatagaaggtgaacgctctaattcagcggttagttcatcgctcacttttttgattcttggcccaatttctttaatacgtctcggaacatgtacactccaagttttatctcgtagatatcttttgatttcaccgattacagtaggtactaaaaaggcttcaaacttccgttcaaaggacatatcgaatctatttatggcacctattaaaccaaccataccaacttgaactaaatcttcgtgatgtgattgtcctttagaatatttatatgccaatgactcaattagtttttggtaatgtttaactaacttatcctgtgcatctgtattcttattttcttggtgttctttaatccattggttaatttgctcaggtgaaatttcattagctgatttcgactctttcgccattatttcgcacctgctctttttttatatacttagtcatactgattgtcacaccagattctttatatactgtgacttcatccattaaagattcgattaaaaataaacctaggccaccttcgcgtaaaaagtctatattttcgtctttatcgtaaggacctatttttgatttagttgtttcataatcaaaactgtcacctttatcagaaataacaattttaattttatcttctaaaatttcaaaatatatgttaataatgcccacattgttattttctttgtatgcatgtttaactgcatttgtcacagcttcactaactgcaatcttggcatcttcaatatcatcatatgtagcaccagctctcgaaaaaacgccagaaagtgttaaacgaattaaacttacatactctgccgatgctggcacgcgcatttcgataaaatcttctttagattgcatgttattcgacctccgttccttcattaacatgcattaaatccttaagaccagtaatttcaaatagtctaccgatacgatctgacacacctaaaatgtatagttctttatcattttggtttaatgcttttaatgtacctacgaataaacctaaacctgtcgaatccatataactcacattttctaaattaacataaatatcacgagttccatcttgtctcataggtgttaaaacctcttctaattcaggcacagtataaacatctaattctccaccgactttaacttcgtaaaatttatcttgagtggttgtttctatattaagattcatttcattacactcctacttattaaaaatatttatcttcattttaagcgctgtatccaccatatttatatttcaaattattatatacccatcgaaataatttctaatcttcttttttaaattaatttactctttttataatcaaaatagtcatatcatcttttttatttgggttttgaagctttaaaattgcttcatagataatttgaacaatatcttgtgggtgcatatgtttatgttttttaatatattctaaaagtttttgtttatctataaaggtaccttcactatttctagcttcagtcacaccatccgttaaaatgataattaaatcatcaaggtatattggaatttcttgttgttgatatcgtgtttgtgaactgattcctaacactctacctctaactgaaatttcttcaaattcttctttttcagcgcgataaatatatccaggctcatgaccagctgaactacaatacaataaatggttcatttcttcatataaaccataaaacattgtgacgaacatattttgattaatattcttttcaacaacacgatttaaacgttttaaaccatcactcggtaattgtgagtgtccataagaatccatgccaaactttatcatactcattgctaaagcagctggtataccttttccaatgacatctgcaacagcaaagctcattgtgccatcgttatggtcaattaaattaaaataatctccacttactttttgtgccgccactgaaataacgccaatttgaatactatcaaattgtggaatatctgttttaagcattgtttgttgtaagctagaagctaagtctatctctttatcgtgaacttgaagtttatctaccaatctttgataatctcgataactataaccaaatttcttgtaagacatctaatgtcttgaacacatcttcacgcgttaagtttaacgtcaatatatagtttttgtgaatatcgacaatgtcttcaggcaagacgtccttacgaatcacttcgtcagtgtatttctcacacttttttatcaattctactttatcttggcacgttaaactttcatcaattaaacccttataatgttgcttaaattcttccacgattagttgcctcctcacttcccttacaaagcaaatgcttaagcaaggataattatgattcacttactaacatttatttaattgcacttatcaattttgtcgtttgcaattttgctgtagatgatacttttaagctaaaaaaactttaggatggaatacctaaagcctaaaaaacttaagacatccttttataataaaaaatatgaatatcataactggtatttgctaaaatctttgtttataagaaaattcttcgtacagaatttagaaatagttataattattataaagttattgtcttttatatcaatattttatttatctctgaaaaatacatataatagacgcctaatttttctggtgagctactgcattcagccctaaactaatcattagtgcattatctacttctttcattttatcatcggataagtacgtcagtttttctttcaatcgttttttatcaagtgtacgaatttgttctaataatataactgagtctttatccaacttatactttttcttttcaatctctacatgtgtcggtattttcgctttattaatcctaccagttattgccgcaacaataactgtaggactatatttattaccagtatcattttgaattatgactacaggtctgactcccccttgttcagatccctgtactggtgataaatctgctaaataaacatctcctcgtctaatcattcattcgttgaattagaagataaatatgtttcgttgcaatcgcatgcttcacactctatcggaaaagcttcgttcgctagggagagatttaaatcagccatttgtgaatatccttcttttaaagattgttctaagctatgacttctattttgactaaaagataacatatgagaacctccaattgattccaaaagttattaaatgacctttaattactctaatgataacaaattttatatgcactgaccatattattttaacaattcatttgttacaaaacgttgatcaccatcatgatagattcgcggcaaacgtctcgacaagttacaaagcacttcataattaatagtatgttgcttttcagctaccacctctaccgactgtggactttctctatgattatctattaaaatcaccgaatctccagctttaacttgatctggcactttaacaattgtctgatccatacatacgcgaccaataacttcgcattgatgaccatttacatttacaaagctaccttgcattatgcgtaaatagccatctgcatatccaataggtaacaatgctattgtagttgggtcagtagctgtataagttgcaccataacttacagactcacccgcttgtagcgtctttgtttgaactacattagcaattaattgcacacttggtttaaggtgtactttaactttttgctgtacatactctgatggataatatccataaagggaaattcctggtcttattgcattacagaattggcaatccattaatagagagcctgctgagttctgacaatgtatatattcaggtttaattgcttcattgaccatatctttaaaacgttgatattgttcagttgtcatatctcctggttcgtcagcacaggcaaagtgtgtaaacacgccttcaaatacaagttgctcatattgttgaatgatttcaatcacttcttgatacgttttagtatctttaatacctaaacgtcccattcctgtatctaatttaatgtgcaaccataactttttctcttgctcaccagaaatgtttttaattgcttctttcaaccactgtttagacggaaccgttaaggcaactcggtgttgtatcgctttatcaatatctttagctggtaacacacctaagactaaaattttagcagtaatcccatgcattctaagttctatcgcttcatctaacgttgctacagcaaaaaatgtggcgccattttccattaaatgacgtgctactttaacactacctagtccataggcattggctttaacgacagccatcactgttttatttggatgcaatgtactgaatactttgaaatttgatgcaacagcgtttaaatctacattcatatacgcagatctataatatttatccgacatattacttcctcctgtaattcccacacgttttaaaactagatcttaattatcattgtataacaaatttaaaatgctgacttttctaaaacaacttggctcatcgcataatgctcagtgtgtgagatactaacatgtacgataaacccttcgtaatcaatctttggtttgccaagttcgtcgttgtaacagtctatatcgttaaaagctacatgttttcctaagcctgtgcctaatgctttactgaacgcttcttttgtagcaaacctgccagctaaaaattcaattttacgttgctcatgtgtgaaattgttgaatttgtgctgttcatttttagttaaaatccgctcaaccaattttggttgcttactatataacgcttgtattcgatcgatttcgattaaatctacaccaattccatgtatcattgattattcctcatttttattgttttctaaatgtctctcgttatttaaccatcgtttcaatctacgtgcttcacttctatctattaattcaatttcagcttgaccacccgctgtataaagggtcaaagttgctaatcgatagcgtctcattataggaccaacatcgatatcaatattttgaatacgaaaatatggtattaccttttcatccaaaaataaaatgccgtttcgtacacgcaaatggtgtttttcaaatgcatatctgcagtgcttatatcgatagactggcgctataacaagcgtgaaaacagcaacaagtaatattataatcacactactaacaatggataaatggttatctaaaatctcccaaaatagccagttcaaaatattaaatgcgattaaaagtacaagcgctatgggtatccaaaacagcacagcacttaacctcatcacttttttagcgtgtggtgacataaaattataatccctcatcattttcacctcttaaataccatgatttcaatttatttgcatcttcacttcttgcgtattttaagttaatcgattgggctcccacacctttagcaacaataaagctaaaattatttaaattgttgcgtttaagtaatgtatgttgccaagtgtcaaatcctataatgtgatgcgctttaaaataataaatatttcgtttcaatagctcgaaattctggatagtaatttgttcttctgtcattttaaaacccgcatgtttgacataaagatatcctttgatcacaaataaaccaataatgactattgttataatcgtaaataacaataataattgattccaaaaataacagcctatacctgccatagctatgacaataatactaggtattaaaaagtgtctgtggaaacctgacaaaggcataccttcattaacttgttgataagataaatctggtactaaattctggataatttgatatgctttgtctcgtttaataaacggcaatatcggcacactacctgaatcattgtcatcatcttcgatttttttattttcaaaatcacttgtgatgataaaatgtattgctgtgtagccaaataatcttcgtatatatgactgacgttcaacaacagcttgcaatcgtttcgttggtacagttactttcttcttgttaaagagaccatattcaattttaagttgctcattttcaagcatcaccgaaaagccataaaatcttatcattgttataatcgttccaataatatatgccactattaatactagtaaaatgatgattaatactgaaatacttacaatttgaacccattgactaatttcatgatttagcttcgaccatgggatcaactctcttacagccccgtaaatcggtactaaagctgctaacgttacaccaatggcgccactggtcattgccataaatagtgattctttaaaattcatctgatatataggaatgcgtttatttttctgattaagcatactatcagtgttctgcacttcatctaagcgaccttctgcgatgtcttccacattaccttcaatgtcatgattacagttgtcattcttctcagcactagacttttgcgccacttctgtcttcaactctgtttgcaattgatcaatatatcgttcaagatattcaccttgttttttcgaaataacacttaagacaataccatcacttggtgttttgatttgtaaatccacaccaccaataatttgattgacgaccccttgtgtcatatcaacggactgaatacgttttatatttaattctttacgctttttattaaaaatacctgttgttaaaatgaaataattatcctcaatccaatatcgcgtgttcataattccgacaatttgagaaatgtatgatattaaaaagaatacaaatacaatacctatccataaatatgattcgggattcgtataatcaaaatctttcaattgaaagataatgaaaataaaaaagacgactatgttttgtttgatagcattgattatgccattaaaatatgaaatcggatgtaatttttgaggttcagacatcactttcaacccctctcaaattcgacatagttctctcttcgattattttaacatcgtcatgagacatcatcggtaaataaatagtatgacctgcagtcataaatccaactttatacaaattaagcactttactaattggattagatttaatcgacaagtattgtaaacgttcaattcgactcgtttcttctttatatataaaaaatgatgtacgatattgtacacttagttgatcaactttataaaagcgacaatgatattgccataaaggcttaataaataattttaatgtactcagagcacctaaaaccaacaaaatataaagtaagtaatgtggccattcaaatcttaaccatataaaataaaaaatgacatacacagctacactcaatataaattctaagccattcgtaatgtagtaatacaacaatgctgacttaggactcttagtcaacttagtataatctgacatatacccctctccccaaataaaaaattatacggatttataatctatttcattttatttttatatgatgataattatagcatatggaatatttcatgctaatttattcttcctaaaggtacatctaaaaatttaattaagcagaaagtgcttgaattgctaaaaagacaccatgttataattttatcaacatgatgcctttcatctataatcaatctttcatcttatcaagagcgatatttagttcaagcacattcacataatcatttgttaacacaccacgctgcttacgatgttgaatcaagtcggccactcttgaagtagatacatgacgagcatcagcaatacgaggtgcttgcttcaatgcattttcgaccgtaatatgcggatctaagcccgacccagaacttgttgcagcatctattgttacatttgaattcccaaatttaacatgatgtttcatgcgtgctattaattcggtgtttccattcgattcattacttccacctgaagatacgccgtttttatataatttttcaggattcatattataatcaactgcactcggtctcccgtgaaaatatcgtgtctctgtccagtgctgtccaatcaattttgatccaactatacgattgtcatacgtaattaaactgccatttgcttgttgataaaaaaatatttgaccaattaacgtgatagctaacgggaataaaaatccacataataccatagttattatcgttaaacaaatactatttcttatcgtattcatggtacaggctccttcctctttacacaaaaaattgtacaatcatatctattaatttaatgcctaaaaacgggacgattaatccacctaatccataaatcaacatattatttataaagattctatcaatgctgtaaccctttacttttacacctttcatggcaattggaattaaggcaacaatgattaatgcattgaatatcaaagctgatataattgcagatttaggtgacgataaatgcataatatttagtgaagtcatttctggaattgttgacatcattagtgcaggtaaaattgcaaagtattttgctacgtcattagccaaactaaatgtcgttaatgcacctctcgtcattaataattgtttgcctatttttacaacctctattaactttgtaggattcgaatctaaatcaattagattagctgcctctttagcactaattgtccctgagttcatagctaatcctatattcgcttgtgctagcgcaggtgcatcatttgtaccatctcctgtcatcgcaacaatatggcctttcgcttgttcatctttgatgactttaattttatcttcgggtttacactctgcaacaaatctatcaaccccggcttcttttgcaattgtagctgctgttaaagcattatcacctgtacacataactgtttcaatccccatttttctcaattcagtaaatcgttctacaagaccatctttaatcacatcttttaaataaatcacgccaagcatgacattgttttcaatgactattaatggtgtgccacctttactcgatacatccatacagagagactcaatattaagaggaatattgccttgttgttgtttgacaagatttatcatactattaggtgcacctttgaataccgatatttcatttgtaatgattccgctcattctagtttcagctgtaaaaggcttatatgtgccatcaatgtctttaggcagctcatttatatacatctgcttcgctaatcgtacaatactttttccttctggcgtatcatcgtagattgatgacatataagcagcgactatcaatttttcaagcatttgttgattcactggtaaaaattcactagcgattcgattgccataagtgattgtgcctgtcttgtctaaaatcattacatcgacatctccacatacttctacagcacgcccacttttcgctaatacattgaattgagtaacacgatccatgcctgcaataccaatcgccgataacaaaccaccgattgtcgttggtattaaacatactgttaacgcaatgagcatcgcaataggtaaaattaaatgcaggtaagatgctattggatataacgttacaataacgactaaaaatataattgttaacgttgttaataatgtaaaaagtgcaatttcatttggtgttttatttctttccgccccttcaactaaggcaatcattttatctaaaaaagatgtacccgcttcactctcaacacgtatttctaaccaatcagatgttacaagtgtaccgccaatgactccatcaaaatcgccacctgattcttttatcacaggtgcagactcaccagtaattgcagattcatcaacggttgctaatccatttattacaacgccatcagcagggattgtttctccattttctacccgaatattttgtccggcttttaactctgtggcgttcactatccgatacgcaccattttcttctatcaatcgagcagttaaatttgattgtgcttgtcttaaactatcagcttgcgcttttccacgaccttcagcaaaggcttctgaaaaattagcaaacaatatagttattaataatatgataaaaattgtaatcaaataacctcgcgatagatagctagttccaaatatgtcaggaaaacatattaatatcaacgttaaaatcattccaacctcaacgacaaacattatcggattttttattaattgtttaagattcagcttataaaaactcattttcaaagcttctatcaccattgtttgattgaaatatttatttacatgatgcattttttccatccctttactttattttaaagttaaaaattcaccaataggaccaagtaatagtactggaataaatgtcaaaccacttagtaaaacgataaatacgattagtgatacgccaaaataaggtttatcaatcgctattgtatatttatcttgatggtatgattttttattcactaaacttgatgcaatcattaattgcaaaataattggtatataacgagaaagcaacataatgattcctgtagagatattccagaatgttgtatcatctttcagtccttcaaaccctgatccattgttcgcagcagctgatgtcatttcatacataacttgtgaaataccatgaaaagacggattcgttatactttcacttgctccaggaatcataaaagcaagtgctgaaaatactaaaattaaaattgggtgtatgagaaagactaagacaatacatttcatttcacgggcgccaattggcatatttaaatattctggtgttttaccaaccatcaaactgcatataaacaccgtcagtaagacaaatatcaataaattcatgagtcctacgccttcgccaccaaatacaacatttagcatcattaataccattggtcctaatccacctataggcgttaagctatcatgcatgttattaacagaacccgttgtaaatgccgtcgtaataactgtaaatagtgctgacaaacctgctccaaaccgtacctctttaccttccatattcggtccataaatgcctaaattcgctagtattggattaccacgatactcactccacatagttaatgtaagaattgctataaaaatgaaaaacattgcgacaaataatatcaacgcatgacgatgtactcgtttaccatgtctacttaacatgcgaccaaataagaacaacattgacataggaagtaacatcatactgcccatttctataaaattgctccaaatatttggattttcaaaaggtgttgcagaatttcctgctaaaaatcctccaccattcgtaccaagatgttttattgattcaagtgatgcaataggtccaaatgcaatatgttgaatatgtccgcttaaagtccgaatcattaaattagcatgcaacgtttgtggtacaccttgagtcatcaataaaatactaattaaacatgataatggtaaaagtactcggacaataaaccgaacaatatcttgataaaaattaccaatgatattagttaatccagttaaacgtctcaacatcgctatacaaacggcgtaacctgatgcactagatgtaaacattaaatatgtcattacaatcatttgcgttaaatatgtcacatctgattcaccgttatagtgttgtaaattactatttgttaaaaaagatattgctgtattaaacgctaaatctatcgattggtttaaattatgatttggatttaaaaaaagccattgctgaactattagcaatacaaatgttataaaccccataaatccattaaatgccagaaaatgtttgacatatgttttagctgacatgtgttctaaatctgtgccgataattttaaaacacatattttcaaatctagtaaatattaaatctactcttgacgattgcaccaatgctacgcgatatagatatccactaaaaacatacgtaatcataaccatcattgttagaaacaaaattatttccatgataaccctcacttaatatatttctaaaatttttcactacgaattaaggcataaaataaatacaaaactaatgcaataactaccagtaataaaacgatgagcattgccataacctccttacaacacaacaacatcgtaacaacttgtttatgagagaaatattaattttcaaacttagttattaagaaatcattaagatgtgtatgcagaaataaattttatagcatttaattgtgaagaatattatgatattgctatcgaggtgaaggttatgtcaaacactgaatcgctaaacataggaaaaaagcgtggatctttaacaatttacatcggttacagtccaggtgttggtaaaacatttgagatgctttcaaatgccattgaactatttcaaagtaacgttgatattaaaataggatatattgaaccgcatcagcgtgatgaaacaaatgcattagctgaacaattacctaaaatcacaaccaattttactaaacatggtagtcatcattttcaatatttagatgtcgaccgcataatcgaagaatcgccgacaatagtacttatcgatgagttagcacatacgaatatttctagagatcgtcatgagaaacgatatatggatattgaagaaattttaaatcatggtatcgatgttcataccactttgaacattcaacatattgaaagtttaagtagtcaaattgaactgatgaccggtgtacatgttaaagaacgtgtacccgactatttcataatgagcgccgatgtattagaagtcgtagatatctcacctgaacaattaattaaacgcttaaaagctggcaaggtatataaaaaggataggctagatgtagcatttagtaatttctttacgtatgcccacctaagcgaactgcgtacattgacgttaagaacagttgccgacttgatgagtgataaagaaaaagtccgacacaaccataaaacgtcactcaaacctcatattgctgtggcaattagtgggagcatttataatgaagcagtaattaaagaggcattccatattgctcaaaaagaacatgcgaagttcactgctatttatatagatgtattcgaaaaaaacaggcaatataaagatagtcaaaagcaagtgcatcaacatctcatgcttgcaaaatcattaggagcaaaagtaaaagtagtttatagccaaaccgttgcattaggattagacgaatggtgtaaaaatcaagatgtaaccaaattaattatcggacaacatattagaaataagtggcgagactttttcaatacacctttaattgaccatttaatgtcctttgaacatagctataaaatcgaaatcgttccaatcaaacaaatacctgttgaattgaaaatgaacaaatcaccctatcgtcctaaaggcaaacgtttcgccatagatatgttaaaaatgattttgattcaaataatttgtgtaatgatgggactgtggatttatcaacttgataagcatgagtctagtacgattattttaatgatttttctcatcggcatcattttattatccatttggacgcggtccttcatcattggctttttagcagcaattattaacgtatttgtttttaattatttttttacggaacctagatatacatttgaagtatatcgctttgactatcctattacatttatcgttagcattttaacaagtattttaacgagtgctttattaaaacaaattaaattccaatactccattactaaaaagcaactttatcgtacagatttattatttcaatttaatgattcgattaaacaaacttatacagttgaaaacttactaataaatgctggataccaaattaatcaattattgcaacaatcaattactatatacgttatcaatcaatcgaaagtaattaaaacaataccattgcaaaaccatatcgataatacgactcaacagcatgaacaagcattaagctgggtaattaaaaatgaaagacaagctggtgcaacaacagatacatttccaggcattaataaatggttgataccaattggcacatctccgattaaaggcattctagccattgattaccaaagttctcaagtgattaatccatatgatgcatcaatattagaatcaatgttaaatgaactttctctcgccgttgaaaatgtgacgttacttaaacaaacgagagaatccatgttacaggctgaacgtcaactgacacattcaaattttttaagatcaatttcgcatgacatacgtacaccgttaacaacaattatgggaaatttagatattttagtatcacatagtaaagatatgtctatcatagaaaaggaacaattacttgtacatagttttcaagaaagtcagtatttatatctattagtgacaaatattttatcattaacaaaattacagtcatcaaatgttcagataaaattgcaaccttatctcgttagtgaattagtagaagaaatcgatatgattttagaacgtcgccatttaaaaaagcgtataactgtatcatcctcagtaaatttacagtttatacacattgacagtaagttgattttacaagctttattcaatttgattgaaaatgcagttaaacacacttctactgacaccaaaatcaatttatctattcgttatgctagctatgaacaaatcgaatttgccgttatagacgaaggacctggaattagtttagaagaacaacaaaagatattcgagcctttttacacaggatcaaataaatattttaaagataaccaaaaagaaagcatgggactaggcttatatttagtacagactatcctacacaaacatcaatcaaacttacaatataaaccgaaccaaccacacggcagtatattctatttcaatatatatacagactttaacgaaggagacgtataatgcaatctaaaatattgataattgaagatgatcacgcaatcacacatttacttgatgttgcattaactttagattattacaatgtaactacagccgacaatgccacacaagcacactttaaaattcaaattgataaaccagatgtcattttattagatttaggtttaccagataaagatggattatgtttgatttcagaaatcaggcaacatactgacattcctatcattgtaataagtgcaagacaagaagaacaaacaattattcaagctttagataacggtgcgaatgactatatgactaaaccttttaatgttgatgagcttcgggcacgaatacgagtcatcgagagaatcgctaagtcacatcaagaaactaacattgtatttactaacggtttgctaagcatcgactttggctccaaatctgttgttattaataatcaggaggtacatttgacgccaaatgaatttagcttgttagaactattgtcaaatcataaaggaaaagtactcacttatgagatgatattaaaacgaatatatggctatgttaataagactgaaatgcctagtttaagagtgcatatgacatcattaagacaaaaactttcacaatgtcatgaggacgcaaaagatattattaaaacacatccacgcattggttatcaaatgttgcagtggaaagagaaataattaaataaaaaagatcgctgccattaaacgaatgattggcagtgatcttttttatattcaacttattatttatcgcgcactagcgtcagcaaaaagccctattgttttttataagaacatgatactgaaatttcataaagtttatttatgttcgattattcttaatttaaaaatagttctttaaattatatactcaccacatttggtggagaaccatatttacacagaatgatataaccgcatacagatctcaatccaattaaatatttaacctttaaaacgttagtactttgatatctacagagaatcaattattgaaaacaaaaaagagctcaagacattacatctttaagctcttaatctataaattatttttgatggtcagcaaatgtgcgacctttcataggtctgcttccaccgctgctcttctctttacggtcgaatttttttgtacttttcttcttacttgagtatccttttgaacgtttactcttactgtcaaatttaggattaccacgcttactatttctgttacgagaaccacttggtttaccgttacggcctttgcgagataatggtttttcaaaagttaattgaacttcaacttcatcgtttgcttctactaactcttgtaaaagtgcagcaactaaatcaacatcgttatattcatttaacaactctgtagaaatgcgtttcaagcgtgattctgactctttagacatccagttttcaactttttctttgatgtcatcttcacgtgcttgaagtacttctttacgatgtggtggacgaagtgcactcatttttctaccgtttgcatcttcaatttgtctgatataatccatttcgattggattaacaaacgttacagcgataccttctttaccagcacgacccgtacgaccaatacggtgtgtatagctttcagtatcttgaggtatatcaaagttataaacatgactcacaccagaaatatctagtcctcttgctgctacatcagtagcgactaaaatattaatttggtcatttttaaatttctttaatacttctaaacgtttcgcttgtgtaatatcaccatgtaaaccttcagctttatatcctttagaaatcaaagcacttgttaattcatcaacacgacgttttgtacgtccgaatacgattgctaattcaggttgatgaacatctaggaaatttgtaaatgtatcaaatttctctaattctttaacaattgtatagaattcttcgatttgtggatcagacatttcattattcattgtcttaatgatttttggtgatttcataaattgttgtactaaagcttggattgctttaggcattgtagctgagaacaacattgtttgacgttgtactgctggaattttatccataataaatctcatatcatcgatgaatcccatattcatcatttcatcagcttcatctaaaatcaaagtatgaattccgtccgtttttaatgtgcgacgatttaaatggtcgataacacgcccaggtgttccgactacgatttgtgggccttttttcaaggctttaatttggcgttcgataggcataccaccgaatacagtaacaacttggacaccttgtccacggctaaattctcttaattgttcagctacctgcattgccaattctcttgtaggtgctaaaatcaacgattgaaccccttgtttccctactactttctcaattaaaggaataccgaatgctcctgttttacctgtaccggtttgagcttgcccaaggatatcaattccttgtaacgcataagggatactgtctttttggataggtgtcggctctttaaatcccattgattcaagtgactgaaccgtattatccgaaatccctagttctttaaaattttgcaaaataattctcctttttacctgtttatttctcaatatacttttgcatataagttcattaatatttcatcaacttctatatagtaccaccaaaaaaatttaatcgcaataaagcaatttgcgaatatttattagaatcacattaattgattgtcatatttttgtcaaaaagctagcattagataagatgtaagcgttacgcatcattcgaataatcattataaaaaattttttataaaatacgtatatcgttaacattccacaacaaattttactgaaacacatgtgaaattagacattataatactacatctttttgtaaaacattatataaacattcaaactacttcctatataaagtgtgtacatagaattaaccttgatttagtttcaaatttatagatttaacataaaaagaaaaaggcaattttgtatttacacacaaaaccacctcttctttgtaatcttttagtattaattcaaatcatttttataagtaaaaggtccctcgactaatctctatgaaattaaagcatttaccacttcttctaatttcataccacgtgatcctttaactaatacacggtcatgcgcttttaaatcgtttattaaaacttctatcatatcgtctttagaattgaagtgttgtgctttttcgacatgttgctggcccgaatcataaatatacttcgcttcattaccaaacgtatacaacacatctatatgcttttcttctaaataattacctacaccgatatgcatttctttgctattttcacctaattctaaaacatctcctaaaattagaatgcgacgccctgtcaaagtactcagtgtatcaatagctgctctcatacttgtaggacttgcattataggcatcatttatcacagtaatatcattttctaatgtatgttgttccatacgcataccagttaagctgacattttttaaattttgatagattgtgttatatgtcaaacctaattcatgaccaaccgcaatggcaatcgtcgcatttttcatattatgctttcctaatattggcagatcgtaatgttctttattattaatcgtaaatgaaatacctgtagtatctctatcatcaacagaacaaactaatgcattatcagtagcaacaccaatactaatacattttgcattttcaacttctttaacatgtggtttcaataatggttcatcgccatcatatataaacgtaccattatcttttagacctattgtaatttcagatttagctttagcaatcccctcgcgcgaacctaaatcttgcatatgtgactcaccaatattagttataactgcaatatctggttgagcgaggtttgacagaaattcaatttcatggaaacctgacatccccatctccaatattgatatttcagtatcattatctaattccaaaatagttaaaggtaaaccaatttcattattgtaattaccttgcgttttcttaactttaaattcggtatgcaatacactttcaatcatatctttagtcgttgttttaccattagaccctgtgacggcaattactttagggtttacatgtctcaagtaagcttgtgccaattgttgtaatgccgttaatgtgtcttcaacccatataataggcccgcttacattttcatctataggtgtccctctttgataaaaagcagccccagcaccatcttgtaatgctttagagacaaagcgatgaccgtcaacattttcacctttaaatggtataaataacatatttttagaaattgctcgtgaatcaattgtgactccatttatctcttgatttaaaaattgatcttcaatttcacaaggaatccatgattgaatttgctttaatgtaacattaatcataataacaacctcagttagtcaattttgtatttatttttctgtttatcctggtgacgttctttagcaagctcgataagttttgtaatcaattctggataagataagcccatattttcccataactttggatacatactgaaagccgtaaatccaggcattgcatttgtttcattaatatatatttggttgtcttctgttacaaagaaatcagcacggactaaaccagaacaatctgtcgctttgaatgcctctaatgccatatttctaagcgttaattgaacatcttcgtctaagtcagctggaatttgtaattgaaccttaccatctttatattttgatttgtaatcgtaaaacgcgacatcttttacgacttcacctggccatgtcgcttcaggatagtcatttcctaaaactgctacttcaatttcacgtgcgttaacgccttgttctataacaagcttacggtcaaattggaatgcttctttaataccttctttaagttccgcttcattattacatttactgatacctacacttgaccctaagttagcaggtttaacaaagactgggtaatttaatttatcatttactaattttaaaatgttatgttcatatttttcatattcagaacgtaagaaactaatataaggtaactgtggtaaccctcgatgttcaaataattgtttcattacaagtttgtccatagaacttgcagctgacaatacaccatttcctacatatggtacatccaaaacttcaaaaagcccttgaatcgtgccatcttcaccattaggaccatgtaataatgggaatactgcatcgtatggttgtcctgaactactttctttcaatagctgtgaaatctcaagcgcctctccattttctaaatgaagctcatcagtagatttaatttcagctgtaatattattttgctttctccaatcaccatcattggtaatataaatgatatcaacatgatatttgtctttatctattgcatttaatacattttgtgctgtcagaatcgatacttcgtgttctgcacttttccctccaaaaacgatacaaatattttcttttgtcatttcgttttcctccaatgatatatcagggtttgctaccttaatataaattaatattgatttagtcctattgttaattgatttattcgcatctttgaatcttaatagtatcacattttaatgctattttgcattttaaaaacgaggacttatgtgtctgtatctatgttgattcatttataatcagaacaatattcccttctattttattcctaattcaaattgaaatctatagctgatatcactgtgatattctagctaatttttaaaaagtcatgtaaaattgatataaacattagtgagtataaaaggagtttgcaatgaattattcatctcgtcaacagccggataagcattggcttcgcaaagtagactgggtattagtagccactatagctgttttagcaattttcagtgttctgcttattaactcggcaatgggcggtggtcaatacagtgctaatttcggtatcagacaaattttttattacattttaggtgcaatttttgcaggtatcatcatgtttatttcacctaaaaagattaaacattatacatatttattgtatttcttaatctgtctattattaataggcttgctcgttattcctgagtcacctattacacctattatcaatggtgccaaaagttggtacacgtttggccctatcagtattcagccatctgaattcatgaaaattattttaattttagcattagcgcgtgtcgtttctagacataatcaattcacattcaataaatcattccaaagtgatttgttattatttttcaaaattattggtgtctcgttagtaccaagtattttaatattactgcaaaatgacctaggaactacattagtattagctgctattattgcaggtgtgatgttagtaagtggtataacatggcgtatcttagcacctatctttattacaggtattgttggtgcaatgacagtcattttaggtattctatatgcacccgcattaattgaaaatttattaggtgtccaactgtatcaaatgggacgaatcaattcatggcttgacccctatacatatagtagtggtgatggctatcatttaactgaatcacttaaagctatcggttctggacagttactaggtaaaggatacaatcacggtgaagtttatatacctgaaaatcatactgactttatcttttcagtgattggagaggaacttggctttatcggttctgtcatattgatcttaatatttttatttttaatcttccatctaataagattagctgcgaaaattgaagatcaatttaacaaaatctttatcgttggtttcgtcactttacttgtgttccatattttacaaaatattggtatgacaattcagttgttaccaatcactggtattccattaccatttattagttatggtggtagtgcgctatggagtatgatgactggaataggtatagtcttatcaatttattatcatgaaccaaaacgatatgtcgatttataccatccaaaaagtaattaatttaaactattttgagtttcaaatatcataacttttcaagatgacgttatatagtctatttacgtcgtcgatttaaaatgtcatatatagatattactcgataataacaatccctctttgaagtacacattgtaaaatgtacactctaaagagggattttgttatatagtacttgctttcattttagtaaatccagtcaaaaaagctatcatcgaatagtccgacgatagctttaacggtgtgtgattcacaatcacagtcaattattttaattcgtgacttactttattagatgctggcaaagtattaataatgtctaaacgagatttagtttttttaatattcacacctaatgatgacaatagtttgactacattttgaatcttttcaggacgtttcattattatcacctcgtttggatcgctttcaatattatcttaccctattcgacatacctttactacatcatttacaaaatttttaatttattttcaaaattaaaatctatagcgcactctacattataccctaaaatacaattttgtatccttcatcatagatttctttttcaatactattcaaatttgctggtgtctcatacgatacagttacttgaccatctattatattaatattcacttgatgaacacctatcatatttgaaatgcgttctgtcaattgacttacttgttcttctgtttcaattcccgctgtgtaaatcgtattttgatgtatcatcttaaactcctttagtctttaatcaatttttgaaaagtcactaataactcttccattgcctcttcctgagcaccttgattaactttattcataatacaacttttcatatgttgttctaataactttatcgcaacactgtttaacgccgaacgtgtcgctcttatttgcgtaaggacatcatcacaatagacatcttcttcaatcatgcgattaatcgctctcacttgtccttcaattcgatttaaacgtgatttaagattcgtttttatttgttcagaatgatgtgcattatcttgttcagtcatagcattcactccttcatttacattccttactatactatatcccataaaacacaacgtcaacacaaagtgtgtttttcaaactaaattgtcatgatatttaaattgcttcatgatacaattaataagatatactactcgtttaagattttcgatgggaggtttcaaatgatagagttattatccattgcactcaagcattctaatattattttaaattcaatatttattggtgcatttattttaaacttattattcgcctttaccattattttcatggaaagacgttctgccaattctatctgggcttggttactagtcttagttttcttgcctttattcggcttcattttatacttactattaggacgacaaattcaacgtgaccaaattttcaaaattgataaggaagataaaaaaggattagagttaatcgttgatgagcaattagctgctttaaaaaatgaaaacttttcaaattccaattatcaaattgtaaaatttaaagaaatgattcaaatgttgttatataataacgcagcatttttaacaacagacaacgatttaaaaatatacacagacggccaagaaaaatttgatgacctaatacaagacatccgtaatgctactgattatattcattttcagtactatattattcaaaatgatgaattaggtcgtaccattttaaatgaacttggtaaaaaagcggaacaaggtgtagaagttaaaattctttatgatgacatgggttctcgtggactgcgtaaaaaaggcttacgcccgtttcgcaataaaggtggacatgctgaagcatttttcccatcaaaattacctttaattaacttgcgtatgaacaatcgaaaccatcgaaaaattgttgtaatagatgggcaaattggatatgttggtggttttaatgttggtgatgagtacttaggtaaatcaaaaaaattcggctattggcgagatacgcatttacgaattgtcggggatgcagtgaatgcattgcaattacgatttattctagattggaattcacaagccacacgtgaccacatctcctatgatgatcgttatttcccagatgtaaattctggtggaacaattggcgttcaaatagcttctagtggtcctgacgaagaatgggaacagattaaatacggctatttgaaaatgatttcatctgctaaaaaatcgatttatattcaatctccctatttcatacctgatcaagcctttttagattctattaaaattgcggcattaggtggtgttgatgtcaatatcatgattcctaataaacctgaccatccgtttgttttttgggctactttaaaaaatgcagcatccttattagatgccggtgttaaagtatttcactacgacaatggctttttacactcaaaaacacttgttatagatgatgaaattgcaagtgtgggaacagctaatatggaccatcgcagtttcacattgaatttcgaagtcaacgcttttatttatgaccaacaaattgccaaaaaattaaaacaagcttttatagatgatttagcagtatcttctgaattaacaaaagcacgttatgctaagcgaagtctttggattaaatttaaagaaggtatttcacaattattgtcacctatcttataaaatagaaatatgaggagtgtaactttaatgcaacaatcagacgtcattagtgctgccaaaaaatatatggaatctattcatcaaaatgattatacaggccatgatattgcgcatgtatatcgtgtcactgctttagctaaatcaatcgctgaaaatgaaggtgttaatgatactttagtcattgaactcgcatgtttgcttcatgataccgttgacgaaaaagttgtagatgctaacaaacaatatgttgaattgaagtcatttttatcttctttatcactatcaaccgaagatcaagagcacattttatttattattaataatatgagctatcgcaatggcaaaaatgatcatgtcactttatctttagaaggtcaaattgtcagggatgcagatcgtcttgatgctataggcgctataggtgttgcacgaacatttcaatttgcaggacactttggtgaacctatgtggacagaacatatgtcactagataagattaatgatgatttagttgaacagttgccaccatctgcaattaaacatttctttgaaaaattacttaagttagaatctttaatgcatacagatacggcgaagatgattgctaaagaacgtcacgactttatgatgatgtacttgaaacagttttttacggaatggaattgtcacgactagacattgaagttgtagtatgatgatgcgatgtaatggcgtgttgttgtggaagcttggtgtcatgccatgttactttgatgtgttgttgtgggagcttggtgacatgtcatgctactttgatgtgctggtaccacgatgcgtcttgatgtagtgctatgatgtggcattgcggtgttatggtgttatagacaggtttggcgttgatgccatgttactttgatgtgctggtaccacgatgcgacttgatgtagtgctatgatgtggcattgcggtgttatggtgttatagaccggtttgatgttgatgccatgttactttgatgtgctggtgctacgatgcgacttgatgtagtgctatgatgtggcgttgcgctgttatggtgttatagccaggtttggtgttgatgtcatgccgttacgattctatgatatgttgttgggacgttgcaatgtgtattatgccgttgtgacgttattatttcacactgttacatgtataagtgaattgctgtggaaatttgcgacatatactgctacactgatgaatcattgtgtcaagatgacattgcgatgaagaatgacaactctgttattaaccactttttacatactgaaaactcgttaatattatttcaaataaaaacagcagtaggatgactttcacatttgaaatcatcttactgctgtttctatttatcacatattgtataatgtgacactaagtttcgctattgaagcgaaaaataatgtgcgccctataaagttaaaattatcttcaacttttagggtgcacattatttggacttgctaaggttatttctttttctttttagacacaacttgtgtgtttttgccttttttattgctgccgccgttgtgctctctttcatacgcttcaatgaaaggttgtacttcttttttagcgactttttcataataaatgttcgcaaagtgtgtttgaactacaaggaacgccgcactgactgaccagtacaaaccaagtgctgatgctgagcttaatgaaatccagataatcataattggtgaaatgaccatcatcatgtaacccatttgacgttgttcgtctggcatcgttttacttgatacatatgcttggataaagtataaaacaccggcaataattgtaatccaaatatcaggacgtcctaaatcgaaccataagaagtgtggatatttaaacaaaccatctacaagttggtctttaagtacaaagtataatcccatgatgattggtaattggattagcattggtaaacaacccaacatactcttaatcgggttcatgtcatactttttatatacttgcattaattcttggtttgcagccattttttcttcttgtgtacgcgcacgtttcactttttcttgaattttttcaacttctggctttgcaactttcattttttgacgcatcatatgactatttttatagtttgacaacatgaatggtaataaaataatacgaattaccaatacaaggataataatagctaaaccataattgtcgtttaataagttatttcccaaccaatccaatacatttttcattggatctacgaatgtattgtagaaaaacccactacgtttttcaggtttagaatagtcacaaccagccaaaaagaccataatacctaaaaataatggtagtaacgcttttttcttcatttttccacctctatcattatattcacataggatttattctatcacattaatgagtacgtatgaaacaataagtggaaaaatttaactaattattaaaaaaatctttgaatcgattaacagtcttttcaatattttcacttttagaaatggctgaaatgactgaaattccattggcacctgcttctacaatcggcgccacattattagtattgataccgccaatagctacaatcggtagttgcggattcatttctttaaacgttgcaatcatttctggacctactggtatatgcgcgtcatgcttcgacggcgtaggatagattggtccaacacctatataatcaacatgagttaaatcagattttgcatactcatctaaatcactaatactaagtccaataattttatcagtgaaatattgtgctatctctttgactttcgcatcatcttgaccgacatgtataccatccgcgttaatttcttttgccaaggatacatcatcattaacgataaaaggcacatcatattgatgacagagatgctgtaattctttagctaatacaagtttatcgtttccttttaaagctgattcacccttttctcgaaattggaaaagtgtaatccctgcctttaatgctgcttctaatacttcatgaatagttcgatgactcggaacatcggaggtcccacaaataaaatacacatttagatacgattggttaaacatattattccacctcttgaatacgaatccgttgttgataggttgtttcatttaaatgatataacgtatcaagcaacaatggtgaaaacgtaccaggaccaccacaattttcattttcagcagctacctcagcagcaatattaaatacgcttaccgcttcaattaacgcttctatgtctggttctgtttctctaaataaaaatccagcaataacgcctcctaataaacaaccagctccagttactcgtgctaataatggagatccattagctaatacgaaggctttattatcttgaacaataacgtcctctttacctgtgattactattgcagttttatatgttgcgtaagcctttttcgctattgcaaccgcatcaagattagcatcactatctgtacctttcatagttgctgtatcatcaatcaacgctaatatttcagatgcattgcctttaattactgatactttcgctgatttcaataataatttacaaaattgctttcgatatgtagaagcaccaacagctacagggtcaaatacaataggtaagcctgcctcatttgccgtttgagcaatcgcaataatatcttgttcattttctgctgttaaagtaccgatattgattaatagcgcttgtgcaactttgtaaaattcttcagcttcttcgggagcttcactcattgcagggctagcaccaatacttaataaaccattcgctgtaaaatttttaactacatcgtttgtataacaaattgttaatgggttttcaatacgtattttatttagataattcatcgtctaatccctctttctttaaatatgcaaaatgattcactggacctctaccacggccgatttcaggcgtatattgtatactcattgaaataaactttttagccttgtgtacagcctcaaataatggtctaccttttgcaagttctgccgttataactgctgaaaatgtacaccctgttccatgcgtatgttttgttttaaatcgttcattttcaaatgtttgaacaccttcgttagtaaataaataatcttttgctatatcagtatcatttgaatgaccgcctttaatgatgacacctttactaccaatctcattaataaagatgcggccagcctgcataattttttcttcactatcaatggttagtcccgttatttcttcagcttctggtaaattcggtgttactacgtcagctaatggcaataacgtatgctgcaagttttgctttgtgtcattatccattaatgaatcaccgcttttcgccaacataacaggatcaattacatatggaatagattcatgttgcattaaataatgacgaatcgtttccatagtatctgctgtagcaatcatccccgttttaatagcatgaggtaaggtatcattgaagacactatcaagttgttcatctacccattgatgatttaaattatgaatatgttgtacgcccaatgtattttgagcaacaatacttgtaacgacgcccataccatatacaccacatgaatgaaatgattttaaatcagccattacgccggcaccacctgttggatcagtacctgcaatggttaatgctattttaggtttaatcatttacttttcctccaaattcccattgttctagtgtcatagccatattgaaaaatcgacgctcatgtatgcaactttctaaaaatacttgctttacttgttccaattccttgtcagacattgattcggctaatttattcattattgcctcaaatacgttaattatgtcatccatttcagtactataaaaatcaaaccattttgccgtatctttttctctattaagcttatgatcactttgagagcgcttagctaattctgcataaatatatggacaaggtgccattgcagcaattgtataaatagcattttcacgactatgcgcttggaaatacatatgttttatgtaatggtcgccacttggaggccaaacttttgttttaatgatttcttcgtatgattcaccaacaatttgcgctaaaatatcatgcgcaagtacttcaccttcaaccataaattctatttgctctactaaaaattttacgtcattcatgctattcatttttggaattaacaaagcatataagtttgtaaattcttttaaatacgcagcatcagcttttaagtaatggcgtaatgcgtcagctcctatatctccggataacatcttctgaataaagtcatcctcataaatatcattaatgattggctttgcagcttggtacaatttttgtgaaaattccattgtaaaaaatcctccctaaataaaaaaactacttccaacatgaaagtagtttgatggcaatgttgctatactagccccatcacttcaataactactttcctacgttggtactaaccaaatcaggtcataagggtctgaacaattcatctcagccatatcattaggctcccctagtagttccttagtattcaattgcaaattaatcttagcaaacggtttcaacattttcaattattgttgctcagttgtattattatctttaaataataattctataatgacatatatttgcgaaataaaaaaaccggaacatatcgagaattccccgatatattccaatctaaaagttacttatataactattaattagctatgcataaatggcttatgcagtaacccaatgtccagcgccaccagtgttatataattttactgctgcggcatcttgaacactttcaggagcatttgctggtgatacacctttatatttagcaggtgctactgaatcccaagttgattgtaagaattgatacttaccagctgcacctgatgttggatttacagcatgaatattgccacctgattcacgttgagcaatttgttttagatgagcattcacatttactgatgaaccttctgatgattttgattcagttggtgttgcagtaacttgtgaattgtttgatgttgatgcttgtggttgttgagtttgagcattttgtggtgcttcaacttcttgtgattgtacttgattagcttgaacagctgatggtgcaacattattagttgcaggtgcttgtgcactcatgtctgctccattagtacctgttgcatggtaattccaagcaaagtgtgtaccatctgattcaaagtgataagtaaacccttcatagtcaaatgtataattataagccccagcttcaattggtttttgatttaatgtttgatcatttgattgcgccatttgcgctaaagatgctttatttaagtccgcttcacttgcatgggcttcgtgacctgcatttcctgctacgattcctaaacctactgctaatgatgatgcgagtaatgttttcttcataatcttaaaatcctcctacaagtaatttgtttctctaaaagttttacagagactactgtaacatctataaaatccgtgcaggttacaacaaaataaaaaaatagccttgttttttacacagtgattacaacgaaatcccccataatttcagatatgattctatcgagaattgtcatgacagtaaaaatgttttttatttgcaattttttatgtaatcgttttgcaatctatgtctattttctattagaaaaactacacaaaaagacgacctacacaacagtactagtcatgtaagtcgtttttaagtgagtatatttcaagttaattagatctataaaaaatttaggatggattaaatgtatattaaggatgtttaggataattggatttaaatttctaataagtcatgattatctatattttgagagtcaatatctaaaatactatctgagagaatttcattattttgggatttaggggacataaattttattgtttcaacatataattcagtgacaaagtgtgtttgtccgtctttatcatactttcttgatctcatttgaccagttataccaaccaatgtaccttgattagtatatttttctatattagaagctaacttgccaaatgctttacagaataagtaatcacagacgatttctccattttcatctttataatttcggtgcgttgcaacacaaaacgttgcaatttttctatcctccttttcaaatatttgtgcgtctttcgtcagtctcccgacaattacgattttatttagcatgtagtgtgtgattcacctcctatgcctatatcttaattactagcttaaaaatggtcaaaatggcaaattttatataattaatagctatagcatctcgttatttgttatatttaaagaaattagtcatgaaatgaccttaaatcttctaaataattcaaaaatcataaatattaaactaatgggatgtgggaatatgaaaacttttaaagcagtaaggtttcaaattgtgaatgaacacggcagaattatagaatatgaattagaagatggcgtaataattaataaagaggaaagtggcacgggttggttgcttgaaattgtcatttctaatgagcattatgaaacatttaaggaatatcaagacaatgaacagttattggatattcgtgtcgtcatcacgcgtccagccaatgatccagctttatttgaatctactgtgaaaagtattaaaaattttaaaacaacaatgtctatcgtatttgaatgtcatatttacactttacgtcaacagtatgctgaaagtttattagaacaacttattgatgatggattatctggtgaagaattaaaaaaatcatttaatcgaatgatgcagtctaaaccaaagttaaaggatgaaaaattagaagagtaaaataaaaaacattcaaagattatgccaacacattaaatctttgaatgttttttttgttttattttacatcttgaattgcaaatgtaagttcacaactacaagcaagttgaccatcgacagtagctttagcattacctttacctattggtcctttaattttagtgatttctacttccaacgttaaagtatcaccaggtactacttgacgtttaaaacgacatttatcaataccagcaaataaagcgattttacctttattttcttcactatttaaaatagctaccgcacctgtttgagctaacgcttcagtaattaatacgcctggcattaccgcatactcaggaaaatgcccttgaaagaatggttcgtttcctgatacttgtttaatagccacacaacgttgaccttcttcatattcaactactttatcaattaataaaaatggctgtctgtgaggtataatttgtttaatttggttataatcaaaaattgtttccatggttgaaatcctccattatattaatttactgaattaatcgttaatacgttcaatgtctgcacctaattgcttcaatttaccgtgtaagtcaacatagcctctatctaggtgcgttaattcagtaacgcttgttttaccatcagcaactaatccagctaaaattaaggcggctgctgctcttaaatcagtcgctttaacttgtgcaccttgcaattgacttttaccttcaagtttagcactacgaccttctacattgatattagcattcatacgtttgaactctgcaacatgcataaaacggttttcaaaaacagtttcggttacgactttatgaccatttgccgttaataacaatgccatcatttgtgattgcatatcagtcgggaatccaggatgtggtagagttttgatgtctacaggttgtaattccccttcagcacgtacacgaataccatcttcttgatagtccaattcaacgcccatttcttctagtttatagactaaactcgccatatgttctttgattgcaccacgtacaaaaatatcaccacgcgttatagcaccagcgattagtaatgtgcctgcttcaattctatctggaatgatagcatgttctacaccatgtaatgattctacaccattgattgtaattgtgtctgtaccagcaccagtaattctaccacccatttcattaatgtagtttgctaaatcgacaatttcaggttctttagctgcattttcaattaaagtcttacccttagctaatgatgctgccataataatattttgtgttgctcctacacttggaaaatctaaatgaattgatgtaccttttaatccatctttagcattagcataaatattaccattttcaagatgaatttctgcgcctaaagcttcaaaacctttaatgtgttgctcaatcggtctacttccaattgcacaaccaccaggcaatgcaacaatagcatgtcctagtcttgctaaaagaggtcccataactaaaatacttgcacgcattttactaacatattcatatggtgcctcttcatttagagtctttgttgcatcaacgacaacagcattttcgtcctttttgtatgtaacgtcagcatttaaagttgttaatacattatttattgtttctacatcacttaaagctggaacattaactaatttgctcggtttatcagaagctaataaagatgctgtcaatattggtaatactgcatttttagcaccttctactttaacttcacccgttaatttatttccacctttgattactattttatccatcgtaaatcctccacttagaactcctattactttacatttccctattttaaaattattttaagtcattatttaattatatctagttttgattacaaatcatagagttagacttattttattaaatattttacctgcgtcgagtattgtaacaaatctacaataaaattgcttactgcagtgcctaataaaatagcaacaaatatcatacacacttgtaattgagtggcgtatccttttttaaaaaattgatctaatctaattgattgtaaagcccaataggcaatacaaatacatacaacatgtaacactaaatggataactgcatattgtccgatataatccattttatcacctcataagattactgtattacattgtacatgaaaaatttaaataatgatacaaagtttaatacccgtttttagtaaagtttaagctaacttactatataattctttttacataaatatcataactataaaatatcttggtatgaaaaaatgtagataatttcaaaaaatgaaatgtcgactgtagatagtggtgaaggaaattttgattttagcaatctattagtgattgtaaaaaagtaaaactattcttgggagtcggacataaatcaatgtctagactctatagtgttgtatttggcagtagttgacggggccccaacataaagaaatactttttctttagaaattagtatttcttatacatgagttttactcatgtattcctatttttaaatacacattagctgtgtttaatgataaagaaccactacatcataaatctttaatggttctttatcaattccttcccccctctcatgttttgtatctttaaatcaatataattcaaaaaagggtcgaagatatgaaatcacatcttcgaccctttatttactattttaattcagccacacgcaaacggttatttgctctctctaaagctctttcggctctatgaatatcagtattgtcgtcatcattttccaagtgagactctgctcttgctttggctaatttagctctttcaacatcaatttctcttgcagtttctgcagtctgaacaatgattgaaactttatcttttctaacttcaacaaagccatcgcttacagcaatatattcagttccatcgtgaaatttcacttttacaaagcctgtttttaaagcagctacagttggaatatgtccactcatgacacctatctcaccagctgttgtttgcataacaacgagttcaacattatcacgattgtaaacagaaccattaggagtgacaatatctaggtttaatgtattcattatccattcctcctaattgttatacttcaacacccatatctttagcttttgcaataacatcatccatgctaccaactaaacggaatgcatcttctggaatatggtcatatttaccatctaagatatctttaaagtttgcaactgttgtcttaacaggtacataagaacctttttgaccagtaaattgttccgctacgtggaagttttgagataagaagaattgaattctacgtgcgcgttcaactgtttgtttatcttcatcagataattcgtccatacctaagatagcaatgatatcttgtaattcacggtatttttgaagtgttgattgtacatcacgagctacttcataatgttcttgacctacaattgatggttccaatgctcttgatgtagacgctaatggatccacggctggataaatacccatttcagttaatttacgttctaagtttgtagttgcatctaaatgggcaaacgctgtcgcaggcgctgggtcagtatagtcatcggcaggtacgaataccgcttgaatagaagtaactgatccttttgttgtagacgtaatacgttcttgtaattgtcccatttcagtagcaagtgttggttggtaacctactgcagaaggcatacgacctaataatgcagatacctcagaaccagcttgtgtaaatctgaaaatgttatcgatgaataataatacgtcttgaccttgttcgtcacggaaatattcagccattgttaaaccagataatgcaacacgcatacgtgcaccaggtggctcattcatttgcccgaataccatggctgttttcttaattacaccactgtcactcatttcgaagtataaatcgttaccttcacgagtacgttcacctacaccggcgaatacagaaataccaccgtgctcttgagcgatgttgttaattaattcttggattaatactgttttacctacaccggcaccaccgaacaatccgattttaccacctttaatataaggtgctagtaaatctactactttaatacctgtttctaaaatttgaacttctgttgaaagttcatcgaatgctggtgcttgacgatggataggatcgcggcgaacagaatcactaatttcttctttaaggtcaattgtttcacctagtacattaaatacacgacctaatgtttcgtcaccaacaggtacactaatttctttgcctgtatcttttacatccatgcctctttggacaccatcagttgaatccatcgcaattgtacgaacaacgtcgtcacctaattgcagcgcaacttctaatgttagttgtattgtaccttcttctttaggcacatcaataaccaaggcgttattaattttaggaacttcgttatgttcaaatcgaacatcaattacaggacccataacttgagttacacggccaattcccatgctattttcctcctttaaatattattcaagcgctgcggaaccaccaacaatttcagtaatttgttgcgtaatttctgcttgtctcgctctgttatattctaatgataagtcatcaataagttcagttgcattatcagtggcatttttcatcgcagtcatacgtgttgcatgctcacttgcttttgcgtctaatattgttccgtaaatcaaactctcaacatattgaggcaagattacacttaagatagattctttatctggctcaaattcataagaagacaaatgaccatgccccttactagaatcctcttgagataatggtaatacttgtctagatgtaggcttgttttcaagaacgctgacataatgactatagtatatatttaattcatcaatttcttcttcactgtataagtctatagcatggttagctagtgcttgaacagatttgaaagaaggttgatcaggtacgtctacttgagaatactcaatgtcataacctctattttttaggaaatcaacaccttgttgccctaaaactacaatactgtattcgctactatcttgatgtttcgcttcaatatcagtaatcaattttttaagcacgtttgcactatatgcacctgctaaacctttatcactcgtgataactaaatatccacttctagtaattttacgaggtcttagcattggatggtttgtattgctacttgcccctgcaactgcagtaattgcatcttgcattttatccatatatggtgtgaattgttttgtatttttttcagctctacgaagttttgaacttgataccatgttcatcgctttcgtaatctgcttcatttttttggttgattttattcgagtatctatttctttaagagaagccactatctcaccaccttatactaaacttgtttattattcagatttgctaaagctttttttgaattcgttaattgctgtgtcaaacttctcagcatctggtaagccaccagtttctctgatttcatttaacagttcagtagcatttgattctgcccagtggtttaactcgtcttcaaaacgtgtgatatctacaactggaatatcatctaaatatccttttgttaatgcataaataatcaacacttggtgttcgactggtaatggtttgttttgatcttgttttaagacttcaacagtacgtttaccacgttctaatttacttgcagtaaattcatcaaggtctgaaccgaattgtgcaaatgattcaagttctctgtatgacgctaagtcaagacgtaacgtaccagcaactttcttcattgctttaatttgtgcagatccaccaacacgagatacagattgtccggcattaatcgctggtcttacacctgagaagaataaatcagattgtaagaagatttgtccatctgtaattgaaataacgtttgttggtacataagctgaaatatcaccagcttgtgtttcgataattggtaatgcagtaattgaaccgccacctaagtcatcgtttaattttgctgctctttctaataatctactatgtaagtagaatacgtcacctgggtatgcttcacgacctggaggtctacgtaataataatgataactcacgataagctgctgcttgtttagttaaatcatcataaacgattaaaacatgtttaccgttaaacatgaattcttcacccattgttacacctgaatatggtgcaatatataataatggagaaggttcagaagctgatgctgctacaacaatagtgtagtctaaagcgcctgcttgtcttaacttttcaacatttgctcttactgttgaatctttttgaccaatagcaacatagatacaaatcgtaccttgatctttttggttcaaaattgtgtcaattgcaattgttgttttacctgtttgacggtcaccgatgattaactcacgttgacctctaccaattggtactaaagcatcaattgctttgatacctgtttgtaatggctcatctactgatttacgatccattacaccagtagcttttttctctactggacgtgttttagttgtgttaatcggtccttgtccatcaataggttgtcctaatggattaacaactcttccgattagttcttcacctactggtacttccatgatacgaccagtacgtttaacttcgtcaccttcagtaatacctgtgtatggtcctaaaataaccacacccacgtttgactcttcaaggttttgggctaaaccaagtacgccgttatggaattctactagctcaccagccataacgtcatttaatccgtgaattaatgcaataccatcaccaatttgtaatacagtacctacatcagttacggacatttctgactcataattttcaatttgtgagcgaagtaatgcactgatttcttcagcttttatggccatctatgtcactcctctttataattaattaactcttctaaattttctttgtaattggacaagatcatttctaacactaccatctaatacagttgtgccgactttaactctaaatccaccaattaaatctggattaatttttgtatctacaataactttagataacttcgtttgttgagttactagtttgacaatcttatctaactcttcttgactcaattcatatgttgactcaattgttgcaaaatcttgattgtagtgtccgttatataagctttggaacgccttgaatacgtcagctattaatgagatatgtctattatctgctaacacgtacatcatatttttaatgtatggattaatgtcagtaaatacaccattaatcaactcacgacgttgttctgctgtttgagttggattactgtcaaccattctcaattgctcaattttatcttttactgcttcatttataactgttaattcttcattaatagtctctaaattatttgtatctaatgacacgtcaaataatgctttagcatacttgttagctacttttaccattatttatcgcctgcctcttttagatacttgtcaaccaatgctttttggtcttgttcagaaatttcttttctaagaactttagaagcaattaacactgatagttcagatacttgattattaatatctgcaatggcacgttctttttggctattgatttcactttgtgctgtttcaatcataccgtttgcacgtacgtttgcttcatgaataatttgttcttgctgttgacgtgcttgaaccttagcatcttctaaaatcttttgaacttcttcttgtgtttctttaagtttttgtttattttcttcttcaagtttctgtgcatttaacttagcttgttctgcgtcatcgatatctctgttaatatctctttcacgtttatccattacatctttcaatggaccccatgcgaactttttaagtaacgcaagtaacacgatgaaagttaggacctgtacaatcacagtaccccactcaacgcctccagctgcaccaagaacgaataagttagctgtttcagtcacgggttcatgacactcctttcattaaaataatcgctagtgttatatagaaaaaaacgacgaggttaggacctactgaatttatgcgataggcatggtgcgttcatatctcaactatttaataaagttcaaagatattactatatatgcatcatgaattatgtcctatgcgctttgtcccgacctcttttatctgttaattatccagcaaatgtcatgaatgcaattactacaccgatgataggtaatgcctcaactaaacctacaccaatgaacatgatacccattaattgaccacgtgcttctggttgacgtgctacaccttcaactgttcttgaaacgattaaaccgttaccgatacctgctcctaatgctgataaaccaattgcgattgctgctgcgattaaattcataatttaatttcctcctgtgattgtatataattattgaaatttttagtgttcatctgccactttatgtgacatataaaccatcgaaagcataataaagatatatgcttggattgttcctacaaatattgaaaatgcttgccaaacaattaatcctgggatactaataatccaaccccatgctggttcgttaaagaataagccagcaagtaatgttaatagtatctcacctgcaaatatgttaccgtacaaacgcagaccaagcgttaatgttgaagtgaactcttcaaaaacattaataattgccaatggccaaaacggctgtacataacctttaagatattgtttcgtaccacgcattttaattccataaaagtgagttaacagtattatcgttgtagacaacgttaaagtcactgttgcatcagctgtcggtgatttccaccacaatgtgtgatctttcgttactatagaaaacggaagacctaacatattagctataaaaatgtacagaatcagcgttactgctaagaagtggaattgaccaccttttttccaagccatgttaccttcaatgattcccctcacgaaatcaaaaatccattcaacgaaattttgtttgccagttggtctttttttcaaattacgcgtacaaatgatagcaagtagaaaaacaagaaacgccgtaacaagtatcatcaatatacttgataaattgaaaacgatatcaaaaccgaataaattccaactcacgagcggggatttgtgatccataatctcacctctttcttaatttatttgctcacctttagtaaaggacgtatgataactacaacatatgaaatcattaaaccaataattataccgatgatacttacatgcgctttattaaggtaccaaatcatacaggcaataattgcaactaagtatcgccacatatttccagttgaaatatgcatagtgtctggtcttttagctttagctaaatagcattcaaaaatacatgtgttgattgcagaaccagtaacaccaatgattaatcctaagataaatgcatggtgtgtataaaggtataatcctcccaatattattattagataaaaataatattgaatgaactgtttaaaaatgttgtagaaacgactcattttatatgcctccgtgtgactgatatcaatcatgaaaaccgttccactcatacaaactaaatgataatataggcgatttgtggtgtcaattctattcaaattgttgtaaaaaaataagcatagttagacacaatttagacacaattagacaaaaagtctattttcctcagaaatcgcttggtttttcagtgattaaattcaaataatacttaatatgattaactattctttctgaagcaaatccatcaccgtaaggattagatgcttcagacatttgatgatataatctctcatcatcgattaattcttttgcagcttgatacacattttgcttatttgttccaatgacttttaatgtgccagcttcaacaccttcaggacgttctgtaacacttcgcaaaactaaaactggcttattaaatgatggcgcttcttcctgaattccacctgaatctgtcaaaataaaataagattttttagcaaaattatggaaatctactacgtccaaaggttcaatcaattcaattctgtcatgactacctaaaatcttttgagccacctctcgaactttcgggtttttatgcattggatataccagtgctaaatcagtatactcatctattaagcgtctaaccgctttaaatatattttccatgggtttcccgatattttctcgtcggtgtgctgtcataagaatgaattttttgtcatggtatttatccatgatgttagatttataattgtcatcaactgtatatttcatagcatcaatcgcagtattaccagtgacaacaacactttctgaatatttcccttcacttaacaaatgcgatgcagcatttttagtaggtgcaaaatgtaagtcagctaatacaccaactaattgtctattcacctcttctggaaaaggtgaatatttatcataacttctaagccctgcttcaacgtgtccaatcggcacttggttataaaatgccgctaaaccacctgcaaatgtcgtcatcgtatcaccatgtacaagtaccatgtctggtttttctaattgaatcacttgttctaattgagtgattgatttagaagttatctcagaaagtgtctgtcctgatttcataatattcaaatcgtattttggtttgatttcaaaggtacttaatactgaatcaagcatttctctatgctgtgctgtaacaacaacaattggctcgagcattttttcttgttccaaagctttaactaaaggagccatctttatggcttcgggtcttgttccaaatatggtcataatctttttcatcaaactacttatctccgattcttctatttagtaccaaacaatctatctccagcgtcgcctaaccctggtgtgatatatgctttgtcatttagcttttcatcaagtgcagcaatataaatatctacatctggatgtgcttcatgcatcttttctacgccttctggtgctgcaattaaacacatgaagcgaatatttttagcgccacgtttcttcaatgaagtaatagcttcaattgctgatgcgcctgttgctaacataggatcaacaacaatgatttgtctttcagtaatatcttgaggtaacttagcaaaatactctacagcctttaatgtttcgggatctcgatataaaccgatatgtccaactctggctgcaggtactaaacttaaaataccatcagtcatacctaaaccagctcttaaaattggaacgatagctaattttttaccagctaatcgtttagccgtcattttagttacaggcgtttcaatatcaacatcctgaagctctaagtctctagttacttcatatgccatcaacataccaacttcgtctacaagttctctaaattctttagtacctgtatttacatctctaatatagcttagtttgtgttgaattaatggatgatcgaaaacgtgtactttactcataaaaattactcctatctttgtgtatgtttattgatatagaggatattcagctgttaatttcgcaacgcgttctttagcttgttgtaatttttcttcatctttactatttttcaatgctaaactgatgatttttgcaacttcctcaaaagctttttcatcaaatccacgcgttgttgcagcaggtgtacctaaacgtataccactcgttacaaaaggtttttcttgatcgaacggaatggtatttttgttacatgtgataccaactgaatctaaagtctcttcagcttctttaccagtaagtcctatagacccttttacatcaacagctactaagtgattatctgtaccgccagaaacaattctaaatccttcattaattaatgcttctgcaagaacttttgcgtttttaaccacttgttgttgatacgttttgaaattattttctaacgcttctccaaaagcaactgcttttgctgcaataacatgctcaagaggtccaccttgaataccagggaaaattgttttatctatgtcttttttatattcttccttacataaaatcataccaccacgtggtccgcgtaatgttttgtgtgttgtagttgttacaaaatcagcatattctactggatttggatgtaaacctgccgctactaatcctgcaatatgtgccatgtctaccattaacttagcgtttacttcatctgcgatttctttaaactttttgaagtcaattgttcttgaatatgctgatgctcctgccacaataagcttaggcttatgctctaacgctaatttacgaacttcatcataattgattcgttctgtgtctttatctactccatattcaacgaaattgtagaatttaccactaaaattaacaggcgctccatgtgtcaagtgaccaccatgactcaaattcatacctaaaactgtgtcgcccatttctaatgcaactaagtaaacagccatgttcgcttgtgaacctgaatgtggttgaacattgacatgttcagctccaaacaatgctttagcacgatcaattgcgatgctttcagtaacatctacaaactcacagccaccataatatcggcgtcctggatagccttcagcatacttattagtcaacactgaaccttgtgcttccataaccgcttccgatacaaaattttccgatgcgattaactctatgttgctattttgtctctgaaattctctctcgattgcttctgcgataactttatcttgcttggtgatataagacataaaatctccccttctttcaaaaaaacttattggtatttagcacgttcgccaccaatctttttcggcctagatgtggcaatagttacaattgcctgtcctacttgctttactgaggtccttacaggtacacatacatgtttaatatgcatgcctattaacgtttgaccaatatcaattccacaaggaacagtaatatgttcgaccacgatcggatccttcatatgctgaaaagcgtatgttgccaaactccctccagcatgtacatctggaacgacggaaacttcttccattgttaatggattatactgagatttttctattgttatcgctctgttgatatgttcacatccttgaaaagcaaaagtaacgcctgtctctttactcacaacatctaatgcattaaaaatagtttctgcaacttccatcgaaccgacagtccctattttttcgccaatgacttccgatgttgaacatccaattaaacatatatctcctttattaaaaaaggacatatcttttaattcgtctaataacattgtcaaatctttcataaaagcccacccttcctaaaaataaaaaaggaatatagcaaagtgctacactcctctattataacttatttaactgttaacatatactaattatacagaattcctactagcaaataatatcttttaattttaaaattaaacttacaagttcttcataggtatgtacatacatttcttttgttccaccgtatggatctataacttctcctgcttcttttacatattcatgcaatgtgaaaacatgattttgcaaaccaaagtgtgcctctattaattctttgtgcgaatacgacatcgtcaaaataatatctgctttcaaatctgcttcagtaaattgttgcgataaggtcgtttcagctaaatgatgttcttcaactaagtcttcaacataattcgaaacaccttgattgttcacagcgaatatacctcttgattcaaattgatgatttggcataacctcttttgcaatactttccgctaatgggctacgacatgtgttacctgtacaaacgaataaaatcttcatagttcacatcctttaataatgtgattacctgcagcttttaacatgcgattcataattgcttctgtattatcattcagctcaaagccgtatatatacgccgctgaaatattttcattttcatcaagtgaatgtaacacatcataaagattatgacttgcttgtttaacatcattgtcatcctgacataattgaatgaattgcgcttcacttggtataaacgccaccttattactcggcacaataaaagctatagaagaccaatctttaccgtcatttccaattttgctctcaatatctgtaataattgtaagtggtgtattgggtgagtaatgcttatacttcatacctggtgcaattggctgttcagtatcattataatcagcatgggcgatactattcggaagtatttctgtaatcattgctgctgttatagaaccaggtcttgcaattttataaggaaaagatgtgcaatctaaaaccgtactttctaatccttcttcactttgttcagcttgaacaataccatcgatacggccattcaaatcttgatatacatgattgaaagttgttggtgaaggtctaccacttaaattagcacttggagcagctagaggttcatttatgatttgtaataattgtctacctacagaatggcttggcattctaacagcaactgatgataaacctccagaaacttttcgacatagatagcctagctttaacggcaatataaacgaaatagggcccggccagaatgcctgcattaacttttctacgcgtggatccaaagtatatgtaaaatcttttaattgacctttactgtgtatatgaacaataagcggattgtcagatggacggcctttagcttcatatattttagctacagcttcttcatctgtcgcatttgctgcaagtccataaactgtttcagttggtaaacctattaaaccaccgtttaaaacaatgtcttttatttcattaattttaggatattgctgtaaatcttcattatattctctaacatcccaaattttagtatccaacttaatcacgcctttcttatttatcataatataaagcaaaaagctatgcacttaactaatcatagcaaaggcataacttctaattaccatttaaatgagacgattcgatcgtggccatttatatctttaataatgtcgatttttttgtcaggaaatttatttaaaattattgatttaagtgcctcaccttgattgtaaccaatttcaaaaacaactgggctgcctttttccataacgtgaggtaaatcttcaatgattgattcataaatagcatatccatggttatctgcaaacaatgcctgatgtggttcgaatctcgtaaccgttggagacatcgtaaccatatctttttcatctatatatggtggattagatatcaagccgttcaacttgataccttcattaattaagggctttaatgcatcccctgttaaaaattgtatttgtgattgatgcttctcagcattattacgagccatattcattgcttcaagtgaaatatcagtagcaataacatttaaatccggcttttcacatttcaaagtaattgcaagtacaccactacccgttccgatatctacgattgttgcatcatcttctaactgttgtaagaaatgcaacattacttcttcagtttcaggtcttggtatcaaacaatttgagtttacatcaaacgttctaccataaaatgaggcaaagccaactatatactgtataggctctcctaataacatacgttgtaatgctaagtcgaacttcataatcatcgctttcggcatatcatcatgcatgtggactacaaagtccgtacgcgtccattgaaatacatctaacattaaccattcagctcgtgtttgttcaaaccctttttgttgtgttaaatgaattgcttcatctaacttttctttataattcaccattattaagttctttcaatttatctgtctgctctgataaagtcagtgcatctataatttcttctaaatggccttccataatttgccctaatttttgaagcgttagacctatacgatggtctgttacacggctttgtggataattataagttcgaatacgttctgaacgatcaccagtaccgactgctgatttacgttgtgacgcatacttttgttgttcttcttgaactttcatatcgtataaacgtgcttttaacactttcattgctttttcacggttttgaatttgagacttctcagaagatgttgcaatgacaccagttggtaaatgggtaatacgtactgcagagtcagttgtgtttacgtgctgaccacctgcaccacttgaacgatacgtgtcgatttttaaatcttcatttctaatttcaatttctacatcttcaacttctggtaaaactgccactgtagctgttgaagtatgaatacgtccacctgattctgtttcaggcacacgttgaacgcggtgcgcaccattttcaaatttcaatttactatacgcgccattaccagaaactgagaaactaatttctttgtaaccaccatggtcactttcagacgcttctactatttcagttttgaatccttgtgattcagcatactttgaatacatacgcattaaatcaccagcaaaaatcgcagcctcatcaccacctgctgctgctcttatttctacaataacgtctttgtcatcattaggatctttaggaatcaataatattttaagctcttcttcaagatttggaagttcagctttaataccattactctcctcttttaacatttctacttcttctttatcatcagtctcacttaacatttcttcaatatcagctaattcttcttttttagctttatagttacgataaacatctacagttttttgtaaatcagcttgctctttagaatatttacgtaatttatctgaatcatttacaacatctgggtcacttaacagttcatttaactgttcgtatctttcttctacaatatctaattgatcaaacacttataattcctccttattattatcactaggtgctacgatatggtgcgcgcgacaacgtggctcataactttcattggcacctactaagataatcggatcatcgattttagctggtttaccatttattaatcgttgcgttctactagatgaagaaccacaaacagcacaaactgcttgaagtttcgttacttgttcactgacagccatcaatttaggcattggttcgaacggttcgcccctaaaatccatatctaatccagcaacaataacacggtgtccatctgctgatagtttttctactatacttacaatttcatcgtcaaaaaattgcacttcgtctattcctataacatcaacattagttaagtcgtgcgtcataatttcacttgctttagaaatattaatcgcttcaatggcattaccattatgagagaccactttttctttatgatatcgatcatcaatcgccggtttaaatacaacgactttttgtttagcgtatataccccttcttagacgtcttattagttcttcggatttaccgctaaacatactacctgtaatacattctatccaaccggaatggtaagtttcatacattgagagttccacctttttcaaaacataatcgctttattatatcatatttcaaatattcataaatgtctttttcataattatatcgatattgtacatgaacaattattttataaatttgtcttgcatatttatatacagctattctaatttgttgcttcttattcgtgcgatgtttctactcaatacaaactttaataaagggggaaatttatcattatgtattaacaacatggtattgagtcacttctttgaacacagtcgtaagtatatacccttactacgcttataaataaaaaagctgtctacaattccattataggatgcagacagcttaacgattactatattagttgtttgatttaagaccaaactttttgttgaaacgttccacacgtccatccgcagcagcgaatttttgacgtccagtgtagaatggatgtgaatcagatgaaatatctaaacgaataactgggtattcttttccatcttcccactccatcatttctgaagatgtttttgtagaaccgcttaagaatttgaagtttgtagtagtatctaaaaagattacttggtgatactcaggatgaattccttgtttcattattttcagctcctttgccctgaaccatctggaacagagttatttgtgagtttttacccaatactgtgtaattataaaggtaattaattcaaaacgcaagcccctatataatgtttattaaattataggtcgacccgttttagtactttcttctgcagacttttgtagctgcttgaagaaatcttcattattcttagaccttttaagtttgcgaataaatctttcagtaaagtcagttgagtcagtgaatagatttcttaattgccataatgtgtctaattcagatttacttatcaacaattcttctttacgcgttgaacttctgccaatatcaattgcagggaagatacgacgttcagacaatttacgatctaaatgtaactccatgttacctgttcctttaaattcttcgtaaatcatatcgtccatacgtgaacccgtatcaactaatgcagttgcaagtattgttaaacttccacccgcttcaatatttctcgctgcaccgaagaatgcttttggtttgtgtaaagatgcaggatctaaaccacctgataatgtacgaccacttggtggaataactaagttataagcgcgtgctaatctcgttatagaatccattaaaataatgacatcttccccaatttctactaaacgctttgcacgttcaagtaataattcagctactttaacatggtgttctggtggttcgtcaaacgttgaatgaacgacttcagcagcttctactgagcgttctaaatctgttacctcttcaggacgctcgccaactaacaaaataaatagctttgcatctggtttgttcgtactgattgcattcgctatttcttttaataacgatgttttacctgctttaggtggcgccactattaaaccacgttgacctaaaccaatcggtgttactaaatccatgatgcgcgttgaataattttgtatttctgtctctaatttaatacgctcatctggataaagtggtgtcaaagcttggaaatgcggacgtttcttcacttcttctgcgttatggtcattgacaaagtcaacttgtaataagccataatatttttcgttatctttaggttttctaactttcccagttactttatccccacgtttaatttcaaaacgacgaatttggctagcagatatataaatatctttttcccctttagaatagttcactgttcttaaaaaaccataaccatctggttgtatatcatctaagataccttccatataatagttaccatctttttccatttgtgcttccataatagctagaacaagttcttttttatttaatttactatagttcgtcaacttaagagttttagctttttgagtgagttccttggtagtatagttcttgtacaattcgtggaatgattcatactgaggagatgtacgttctctttcaggcatatagtttacacccatttcattattttttagttagtaagtaatagataggcatgacaatgcataaataactgtgctagcacaatcccattatgctaatccccaaccttttaaatacatgaataactatagcaaatttttattttaattacaaaatctatttataaaaattgcaaaattaaaacagtacacaaaacttaattagtcatgtgcactgttttattgcgatttttaattcaaaaatcaaatttatttaaaatatccagctatagatttcacttctaagaactcttcaataccataatcgccccattcacgacctaaaccagattgtttatagccaccaaatggtaaatctggctttctacctgcttcgtttatttctactgtacctgcttcaatagaacgagctactttatgcaatgtttctttgtccttaccaataacatatcctgccaaaccatattttgtatcatttgcaatttgaatcgcttcatctaaatcgttataagtgataactgacattactggcccaaaaatttcttcttgtgctatcgtcatttgattatctacattaataaaaattgtcggacgtgcaaagtatcctttttcaagtccttctggtttaccaggaccaccataaaataattcagcaccttcttcaatacctttattaatataattttgtacttgatcaaattgttttttactaatgatagggcctacttgtgtaccatcttctcttggattaccgacacgcacttggctaaattgttcttttaattcagctaagaatgcatctttaattttgttaggcactaaaacacgtgtaccagctgtacatacttgaccagtattattaacaactttgcctgttgttgctttagccgcttctttaatatctacgtcatctaggacgatatatggtgatttgccaccaagctctaatgatacctttttaaaatctttagcggctttttccataattttagaaccagtagggcctgatcctgtaaatgacatcatgcgtactttaggatgttcagataaaggattcccaacaccagcaccatcaccattaacaaggttaaatacacctttaggaacaccgactttatcaaaaatctcagctaaaataacagctgcaaatggtgtttcttcagatggtttaagtacaactggactaccagccgcaaatgctgctgctaattttaatgatgtttggtttgtagggaagttccacggtgtaattaatccagatacaccgattgcttctttaacaactaaatcatctccgcggcgttcttcaaattcgtagttatctaatgcgtctctcgctgcaacaaaatggtttagtcccatttgataatggacacgctcagataatgataaaggagcacctaattcatccgtaatagcttgtacaatatcgtcttttctgttttcatattcttttacaattttatctaataacgcttgtctttctttcacagatgtatgacggaactctaaataaacatcgtctgccgcctcgacggctttatcaacatcagctttattacctttagcaactttcccgattacttcttcggttgctggatttataacttctatcgtttcattactattactttctacccattcgccattaatgtattgctttgtgtagtctctcattattctttcactcctcaagaatgatttatatattatttatccgtaatgcatacgatataaacattacattccattatgatacgctcccttttaatatgttcaaaataaaatgctttaaaattttgctgcatctatttttttatatttttaaataaaaataactattcccacatcatcgcaaataatgcgaagacttagaaatagttataatcaatgctatgtttaaacgtcatgtaattatttagcagtacgttgatctgttaaatcgacatatgattgcgcccatgcttcaattggatgtaaagcctctgctaacgctttacctttttcagttagcacataaataatttgtactggactcgtagaaatgatttgcttctcaactaactcccattgtgcaagctctgacaacttaagacttaaagcacgtggtgttattgttttcaaatctcttttcatatcggaaaagtgtgctgaacagtcattacatcttgagagataattaatgattaatccattccaacttctaccaagtattttaaaagtttcttcgagatacggacatacttccatcatcttcacctctcatcaataaatttagaatgtaaacgaacaccattttttaatcagtataattattataccacaaaacaagataaatctatacagtttccgtccaaatatctgcacctaaagcttttaagtgttctacaatatctgtataacctctataaatatgtttaacattgtaaattgtagttacaccctcagcaattaaaccagcaataattaaacaagctcctgctcttaaatcgctagcataaacttcagcaccatgtaatgttgatggttttatcgttgctgtgccttcgtcaacttcaatatttgcacccatgcgctttaattcttcaacatgtttaaaacgctccggataaatcgtatcagttacaaatgaaggaccatttgccataaataataatggtgtaataggctgttgcaaatcagtagcaaaacctggatatactagtgttttaatatcaacaaattgatatggcgcattattattgatgcgaattctttcgtctcttacatcaacattcacacctaattcactaaatttagcagttaatgtttctacatgtttcggaacaatattatttaatataacattttctccacatgctgcagcgatacacatatatgtgcctgcttcaattctatcaggtataacttgatactcagaaccatgtaattctttgacgccattgattttaattgttgatgtacccgctcccttaatattagctcccatacttgttaagaagttagcaacatcaactacttccggttctttagcagcattttcaattacagtttgtcctgttgcataaactgcagctagcataatgttaattgttgcacctacgctaaccatatctagaaaaatatgtgcaccttttaactctttagcttcgattttcattgatgtcgtacttgattcatcaatttcagcacctaaagctttaaatcctttaatatgttgatcaattggacgtggcccaagtggacatcctcccggtaaaccaatcacacattttttaaatctacctaacatggcacccatcatatagtatgaagcacgtaatgattcaactttattatttggtaatgcagcattttgtatttcagttgtatcaacttctaattccgtaccatttagtgatgccttaatatttaaatcttctaataaactcactaaagttttaacatcagagatttgcggtaacccttctaatttcacatgtccttgagctaataatgttgcaggaatgatagctacagcactgtttttcgcgccactgatattaacttccccatttagtgtgcgtccacctcttatttttattacctcttgagccatatcatttatctcctttgtccattactttttaattttttgcattattagcattataaattaattttactttatttgtaaaatagtttattttaatcgttaaaatcttgtctttctattttcgattgattaataacaaatcattcacctttactaatatatgctgttcttccccacttgaccatggtctaaagtctgattattcaactaaatattgacgttgttttgacaattatttagttttaattctacggttttcacgtaaacttttttcataaattgctcattttccttataattatatcacaatcaattttgatatattttaccatttttacgctttcattttaaaatcaaactgttttatttattacttatacgacataaaaaagaagcaaacaccattttgtctgcttcttttaaaattaatatccctacgttattaataacttaaagactaaatattaattatttagcgcggttagaagtaccgaactctttaattttacctttaactgtttctttgatggcttcacgtgcaggtcctaagtatttacgaggatcgtaaacttctttgtcgttatttaaaacgtcacgaactgcttttgctgaagcgatttggttttcagtgtttacgttaattttagctgtaccaaatggaattgctttttggatatctttagtcgggataccagtaccaccgtgtaatactaatggtaaacctgtagataaaccgatttcttccatttctttaaatcctaattttggttcacctttgtatggaccatgaactgaacctaatgctggcgctaatgcatcaataccagttttttcaactagttcttgacattctttaggatcagcataaatgatgccgtctgctacaacatcatcttcttgtccaccaacagtacctaattcagcttctacagaaacacctttttcatgagcgtattcaacaacttttttagttgttgctacgttttcttcgaatgggctgtgtgaagcatcgatcattactgatgtgaaaccagcatcgatagcttctttacatttttcaaagcttgaaccatggtctaaatggattgctacaggaatagtgatgtttaagtcatgcattaacccttcaaccattttaacaattgtgtagaaaccgctcatgtaacgagcagcaccttcagaaacacctaaaattacaggtgcattttcttcttgtgacgcttctaaaattgcttgagtgaattctaggttattaatattgtattgacctaccgcataaccattttcttttgcatcaattaacatttctttcattgaaactaaaggcatgaaagttcctccttgagtgcttacgcacgtatttttcaaagtaattatatcaaaaaaatagcgtcaatgcattgaaatactgcagattaaatgtgtattttttgaaaaatgcgatagttatactaaatgcaaacgtatacatttttatacaatttaagccgttgcataatatgtagtcattaattacaatattttataagtagattggaggataaagatgtcaaaaatcttaaacacacaactaataggtatctttaataggctagaaaaacaatctttagaaattcaaatggccgcccaatgtttaattcaagcaattggtggcgaaggttatgtttatgtaaaaggttatgatgatttacagtttttcgaaagtttcattctacatagtgatgagcgtttaaaatctagccgaaaacttgacgctattaaagactttaaagaaattgactcaactgatcgtgtattattattcgcaccattttataatgatcaagttgcattagatattcaaaaacttatcgacttagatatcgatgtggtcttaataagcaacaaacctaaaacagatgatttccctgatcatctcgtacattttatcgatttatctacaccaagacctatagtctacactgaagattacgataagattgtccaaccacatgcgatggcattgaattatgtatactatgacatttatacacaaatgattgaaatgacaagagacttagaattataaaagtcactattgttatttcataccttgtcactaacataatattaaaattatacgaaaaaccggtactttcaatgtttaacaatgaaagtaccggttttattagcaaatttatttattttgttgatattttaatgaagcttcaataaatgatttaaaaatcgggtgcggacgatttggtctagataagaattctgggtggaattgacaagcaataaagaaatcatttgtcggaatctctaccatttctactaaacgtccatctggacttgtaccagaaatcaccataccatttgcttctaattgttctctatagtcattattaaattcataacgatgacgatgtctttcttcaatttccgctttaccataaacatcttgtgccaatgtgccttctttaattgaacatgaatataagcctaagcgtaatgtaccacctaaatcttcgatatctttttgttctggtaataaatctataattgggtatggtgttgctgggtctaattcagctgaatgtgcgccttcaaggcctaatacgtttcttgaaaattcaactgttgcaagttgcattcctaaacaaataccaaagaatggtacattgttttctctagcatacttaattgcactaattttaccttcacttgcacggaaaccaaatccacctggtactaaaataccgtcgacatctgcaaggtattcggctgcattttcatctgttacttcacttgaatcaatccatctaatgtcaatatctttggcaaaaggatatccagcatgtttcaatgattcaacaactgataaatatgcatcttgtaagctaacatatttacctactaaaccaattgtaattttaccatctaaattattaacgatatctaacaactgtttccattcatcaagctgtgtttcatatttcgcgtttaattgtaaacgtttaataacgatatcatccatattttgttggcttaattgtaatggaatttcgtataaagagtctgcatcacgacattcaataacactttctttattaatgtcacagaataatgcaattttatcttttaaatcttgtgtcatttcatattcagttcttacaacgattaagtctggttgaatacctaagcctcgtaattctttaacactatgttgtgttggcttcgttttcatttctccagcagctttaatataaggcagtaatgtacagtgaacatacataacattttctctacctaaatcgctacgaatttgacgaatcgcttcaataaacggtaatgactcaatatcacctgttgtaccgccaatttcagtgataacaacgtctgcattcgtactttcccctgcaagtaataaacgttctttaatttcatttgtaatatgcggaataacttgaactgttccgcctaagtaatcaccacgacgttcttttttcaatacgtgtgaatacactttaccggctgtcacatttgaaaacttgtttaaattaatatcaataaatctttcgtaatgtcctaagtctaggtcagtttctgcaccatcatccgttacgaatacttcaccatgttgataaggactcattgtacctgggtcaacatttaagtatggatcgaatttttgaattgttacatttagacctctatcttttaataatctacctagagaagatgctgtaatacccttccctaatgatgaaactacgccacctgttacaaaaataaattttgtcatgtcttgacctcctaattattaaagggaatgcttcctcatcaattgtaaaaattacgtaaaacataacattaaagcaagctcattcaagttgtttatttgtcgaattcgacaaaattaaattctgtttacttaccgtttccatactgctatgtcactatgtatatcatttacaactttgatttttgcgttatcatttcttgatttactcaattaaataaaaaaacgctccctctcacaaattctgtaaggggagcgtataaattttatacacgtgtcctatttaaaggagcccgaataaaattttatcatctttcaactaaaagtcaaacaaaaaattaatcgttgaagtcttcttcgtcttcaaacacttcttcgtcttcgtctagttcatcttcatcttcttcaatgactatatccgaatgattgatttcttcttcaacctgctcatcttctggatcatttagttcttcttgatcatctgtttgagctggaatatcatcgtcgtcatccatttcatcttcgcccaataattttaagttttgatcttcttcatcatctgcatccagaatatcgaatttttgaatagttggtgcgattttctcttcaatatcatctaccgaataccaatcacgtaatccccataaattttctccaacatttaaaaaacgaccatctgtgtttaaatccgtgtaaaattgtacaacacgattttcaatttcttcgtactcataatcacctaacgctctaaattcatcgatgatatcatataagttcattgtttcgcctttatcattcaataatgtataagccatatcaataaatgatttttcatcaaccatttgttttgtataatcttgaattttcattgcccaatacttcctttcgaaggatataatctaaatttatacgtctgaattcatttatatatagtaacaaaactaaattataaatgacaatatcatatttcgcaatcactgttagtaatttaaatatttttcgaaaacgacataatcatcagtttgttcgatttcaacgaaattactatttaaacataatggtttaaaatcattattctctccaaacagaatcatcgtaatcacattaaggttgtcatagttttttcttaagtaagttggcaattgtcgcagagcacttgaaccaataccattaaagcgatatgatttatccacttcaatagcagcaatgttcatgcgttcaccaatctgctccaatgcgataaagccaaccttttggccatcaatcattaaattaatgatatgtacattggtcacttctgaacgactttcttcttcaagctttaatgatgaaacatgttttgaatctaagtccaagtaatatagtcgttctttgccaattggtccttcttctttagtcgctgtatgcatgaatccagcacgttcgtataggttccaagcattgtcattttccgcatctactactagatatagatgattaaaatcaggaaatacaccttgaacatattgcggcaatgacatcattattttcgtgccatatccaaaaccttgatatttttcattaatcgataatgaacgaatataaacgacattttcaggtgtatcataaccttcatgctgatagtaacgatgtaatacaaaaaagcccaccacttcatttttatcgtttattgctacgttagcaatcctatcagcatcattaattgcatcatcaataacttctttaggtaaagatgaatatatttgttgtctttcattcaagtcaaaatcattaattgctgaacgatattgttcatcaaatgcttttaaagtgataccttcaaaacaaagttctttagccatatatttaacccctatctttttatatatgaagcatgaatccccatattattttacctattatttcactacgataccattatttgctctaagttaaataaattacttatttatattttttaaatttcaaaattaatgtactattcctcattacttatcattttaatcagagacttacaaatacactgcgtacgaactacttttaatattgcgtcactaactaacaatcctatacaacttcaaaattcctagaaaataatatatataacttaacgtccacgtttgtaaaacattaattgcgatacgcttacaatgttgaaatgcaatggcatcaaatttgttaataattactattattacttgttttttagtcattttactatactattatttaaggatagacattaataatgaggtgggaatcttatgaaagttggcattgacgctggcggtacactaattaaaatcgttcaagagcaagataaccaacgtacttttaaaactgaattaactaaaaatattgatcaagttgtggaatggttaaaccaacagcaaattgaaaaattatgcttaactggaggtaatgcaggtgtcattgctgaaaacatcaacattcctgcacaaatttttgtagagtttgatgctgcatctcaaggactaggtattttgttaaaagagcaaggccatgacttagcagattatatttttgcaaatgttggtaccggtacgtcactacattatttcgacggccaatcacaacgtcgtgtaggcggtatcggtacaggtggaggcatgattcaaggactcggttatttactaagtcaaatcactgattataaacagttaactgacatggcacaacacggtgatcgtaacactatcgatttaaaggttagacatatttataaagataccgaaccacccattcccggtgatttaacagcagctaattttggtcatgtactacatcatttagatgctgattttacacctagcaataaattagcagccgttattggtgtcgttggcgaagttgttacgacaatggccattactgttgcacgtgaatttaaaactgaaaatatcgtttatatcggttcttcatttcataataacgctttattacgcaaagttgtggaagattatactgtgttacgcggttgcaaaccgtactatgttgaaaacggcgcattttcaggtgctattggtgcattatatttagaaaaatagaaaaagaccatttatatgcgcgttgttttaaataaacgctatataaatggccttttattttatggtctaagtgttttgaatacgtattgttccatttattatcacttaattacttacaactcaattcaattaaaatgtaagttcattagacaatttttgcgctgaaacaattgtaccaaccacgccagtttttaaatctatcgcaacggctttatgatcatctctaagttcatctagccattctccgaaaacagaaccttcaatcgtaattaaatcacactcttcaaaatcttcatctcgaacttttaacgctctgtttttaatactccatacaggcataatatgcggctttttttcgtcgctatcattttcactaatgagaataaactgcttactaccttttttagttaagccgtatacttcatcatatttcgctacatcttggacaaattctttgattctaattttatctaattccgtcatcacttcttgtgtaacagctacaacgtttagtagatgcccttcttcttccattgtttgattcataataatatggtcttgttcatcaaacaattcatctaattcataagtagcaaaacgatcaacgtccatttttacaactttatcaaatggaatatcacgacttgttaaaaatgatacggccacactttcttctgtccaaacgcctacatacgcttcacttttataatttaggcgtactagttttttatttttagaggcgaaataaatacattcatttattaatatatctctaaagaatggatatgctttataagacatgcttgaccctcactttttaaaatatgtcatacataaaatagtaaatgactccaacaagttagtcaattagacatattatgaattcaatttaatgtcatgtttttcattttaaaaattcaatagcattaaattttacgtatacacaaattcggtctataacacgaaacatatctagttactaaaaatttcaaaacgataacctttagtatacctttatcaacaaaatggcaactcttataacatagtgaaataaaagtcgccatttaatattagtattacaaagtattgccatatcataaatttaattactgttgactagaatcgaaaaaagcttgttacaaacgcatattcagtcaactactggcaacacaacattgtagcgccttatgttccgaactctaatagtgttcaagttcagctaaaaatgcgcgttcattctccagtactgtttcttttgaatcaccatgccaaatacagccaaaccttgatttaactttatcttcaccgtaccaatcaccatcataataagataacgggtataaactaccttctttgacatatttcaaaatcgtattgaagaaatgtgtgttatcaccttttgaatgataactataaaacttttgatatcctgaattcaactcgttagcaagtaataacatgctcgttgaaccattttgtctaaagtttaaatcaatcgcataaacgttatcatcctcatcgacgagtaggtcaaaaccagctacaccaaagaatccttgattcacaccgttttccataatttgtctacctgcttctataacgtgctctggtacattagtagtattttcatttccgttataaaatccgtacttatccgttaattgcgttgccgcaccaagatattgaatgcctagcgattccgagtatgcaaactgaacgcaataattcgctttttcttcaatcttctgttcgataataagcgaattcgtttcagcagttgcctctttaatacgcgttatcgctttttgtaaatctgcatcatgataacaaatcataacgccatagccacctgctgtcggaagatcatctcccggcttaattactaacgggaattcccaattcttaatctcgttttcgaattgctcaatttttacaacttttctttttggtaaaaacttcccatttgtccattcaggtattcttgctttattatttaaagcaacaaataacgttttatctaatgcataatattgctgattcaagattgtttcatcatgaatatattgaaaataaatctttttattttccttatgtgccaattgtttgatcaagttttcgtaagattgctgattgttaaatgtataaattgagttcggtacttccttaccaataacttgaaatagctgatgcaatttgtctgtcgcactagcttcgtgaacaataacaggtaattgatttgctattaataactccctaccagttaaaaaattagattgatgttcgtccggtttcaaccatggattcgatatatacgaaggtcttgacgtatagacaacatctttgtcatataaatcacttaacgttaagttcggctcattaccattatttgtcattacttcccattccctttcaaatgcgcatgctcttcaataatgtcttgataaacgtcttgatttgtaattaactctaaccccatcaacgccattattttagcgcctttaattaatgcttcatcaccatgtacactcgcagccgcttctctaaatctatgcgtatgtcctactaaattacgtgatcctattttaatatgaggatgtattgttggcacaacatgacttacgttccctgtatccgtagagccataaccaaaatcatcatcaataactgcttcaccaacttcttcagcatatttagcaaataaatcatctaatttcggcgttttaatgaattcattcacaccgttttgaattcgaccaaattcataatcacaaccagtctgtatcgcagctccacgtgcgatttgatttactttttctgttaatatatccaattctttacgcgtcattgctctagtataaaaacgagcatgtgtatagtctggaataatattagctgctttcccgccatctaaaatcacaccatgcacacgttgatcttttttaatatgttgtcgtagttgtgctacaccattaaaataactaatcatagcgtctaatgcatttaacgcttcatctgcattttcagaggcatgagcactttttccgtaaaatttaacatctaaaacatccactgccaaagtatcaatcgttttataagtttcatttcccggatgaatcattaaggcaatgtctatttgatcaatcacaccagccttgacataagaagctttagcgctaccattttccccaccttcttcagctggacatccaagaacgactactttaccaccaatttggtcaatcacttgcttcaaaccaattgcaccaagaacacttgcagttccaatgatattatgaccacaagcatgacccaatcctggcaaagcatcgtattctgctaaaaaacctatagctggcccgtcaagtcctgaatcatatgtcgctataaacccagttgcatgcccagcaatctcggtttcaatttcaaaatcatgctctttcaaacgatctattaaagttcgagacgcaaatatttcttcattaccaagttcaggacgttcatgaattctatgactgatttcgatataactatatttatttgtttctatataatcgagaatttgttgtttttcactcattttttactatctcccttttaccctacactcattttaatcatccacaatattttgttctttcaaaatgaattattacttattctatcggttttatctcatgatgtcatctagtttttctttatttacaaaattttctaataactaaaagcctttcataaatttataaaacagtttcaaattgtaaaacataagccctattgttacaatttaagtattgttagaaacacaacttacaacaaacttaagttttataatgcaacaaatcataagcgttttatagttttgagtagttaataggaggaaattcaaaatgacaaaaatgaatgttgaaagtttcaatttagatcatactaaggtggttgccccatttattagattagcgggaacgatggaaggattaaacggagatgtcattcacaaatacgacattcgtttcaaacaaccaaacaaagaacatatggatatgcccggactacattcattagaacatttaatggctgaaaatattagaaatcatagtgacaaagttgttgatttaagtcctatgggttgccaaactggtttctatgtatcatttattaatcatgataattatgatgatgtattaaatattgttgaagcaactttaaatgatgtgctaaatgctactgaagtgcctgcttgtaatgaagtacaatgtggctgggcagcaagtcattcattagaaggtgctaaaactatcgctcaagcatttctagacaaacgaaacgaatggcatgatgttttcggtacaggaaaataaatcttagtcaatcaagttaatcagaaaagcagtcgaacaatgattttacaatcgccattgtccaactgctttttattatgcttcaaagtcaaaaaatcgaacaaatgaaaaagtaaaatctttaacatttgtccgatttatttgagaaccactataatttcttaattagtcccattaacacgaactgcataggtaaccttaaatatagttgccatgttggcaattgtttatctcctaaaggtaactttttaactgccatatagatattagctgggaatacagctagcaagaatagattgattgtatttttcaagcattgagatggtcttttaattaaaagtgcaagtccaaataatatctcaaagattcctgtaacaagaaccgctgtttttcgaagtggcaaacatttcggtatgatatttctaaattgtcgttctcgtgtaaaatgcaatacacctattacactaaaacctattcctaataaatatcttagtatgttcaatcagcttcaactcctattctgtaatgattttatgaattaatgtaggcgatacaacatgatcagcaattgttatgcttgaatctaattttttaacaacatcgtctacatcttggcgattactgtgaatcgttaataatgattctccttcttctactttatcaccaatttttttatttaaaacaataccaaccgctaaatcaatatcatcctcttttgttaaacgtcccgctcctaacatcatcgaagcgacacctatatcgttagagactaattcagtcacataacctgattttttagctttatattcaatttgatattgagcttgtggcaaacgctctggatggtcaataacagtttcgtcgccaccttggtttttaataaatgttttgaatttttctaatgctgcacctgaattaattgcctcaattagcaacgctctcgcttcttcaagcgtttcagctttgtttgcaagtacaaccatttgagaacctaatgttaatacaagttctgttaaatctttcggaccttgtcctttcaacgtatcaattgcttcttgtaactcaagcgcattgccaatcgcacgtccaagtggctgattcatatcagaaataatcgccatcgtattacgtcccacattattaccaatacgtaccattgcgtgcgctaatgcttcagcatcttctaatgttttcataaatgcaccgctaccagtttttacatctaatacaattgcatctgcaccagcagcaatctttttactcataattgaagaggcaattaatggtattgaattgacagtaccagtaacatcccttaaggcatataattttttgtctgcaggagttaaatttcctgattgtcctacaactgccactttattttcattaaccaatttcacaaatgttgcttcatctatttcaacatgaaaaccatcaattgcttctaatttatcaatcgtaccacctgtatgacctaatccacgcccactcatttttgcaacaggaacatctacagctgctactaatggtgctaaaaccaatgtagttgtatctcctacaccacctgttgagtgcttatctactttgacacctttaatatcactcaaatctatcatatcaccagaattaaccatagccatcgttaatgctgcacgctcatcatcattcatatcttggaaataaatcgccattgctaaacttgatgcttggtaatcaggaatatcccctttaacatagccgccaataaagaaattaatttcttccgttgttagtgtatgaccgtcacgctttttctcaataatgtctatcattctcatttttatcatccttttcttaaaaagcttaggacaaagcatctgcgctttctctagtccatttttaaaagcacaagcgaaaattattatagcaagctatcgatttcatttttaatatcacaatttcaatgcgatgttattattcttaaatagattggttataacgttaaagtccctattaaattatcttagaatcatcatggcatttatgatgtcttaaagctgatatcgacatacttatatatggttacgatgtcccatgcttacatatttttataaaattagtaatctgaatctgcttctaaaccttgcataatttgaacgcctgcgctcgcaccaatacgtgtcgcacctgcttcaaccattttattgaaatcttctaaattacgtacgccacctgatgcttttacttctatatcagcacctactgtatctttcattaatttaacgtcttctgcagtcgcaccgccacctgcaaaacctgttgaagttttaacgaagtccgcaccagccgcttttgttaattcactcgcttttacaatttcgtcatggtccaacaataccgtctcaataatcacttttactgtgtgacctttcgcagctttcaccactgcttcaatgtcttgttgtacatcatcaaaacgtccatcttttaatgcgccgatgttgatgaccatgtcaatttcatctgcaccattttgaatcgcatcttctgtttcaaatgctttcgtcgcagttgtcgatgcacctaatgggaatcctattaccgtacaaactaacacctctgaatcagctagtcgctctgctgcatatttaacatgcgttggattcacacatacagatttaaaatggtatgctttcgcttcatcgatgatttgatcgatttgcgtacgtgttgactcaggcttcaataaagtgtgatcaatcaattttgcactattcattttctatctcctcctttatggttgattataaaaatacggttgtaaattagttgattgagcgtcaggttcatttaaatatcaggttagatgttcgctttttatgtaaccgcatacatatactattacattaattcatttcccataaacaaacaatacaattgaacgtgatatcttcattatgaacgatgacttgacaacaagctaatcaggattatatttttataattctttaattctatagtacaaaaattcgcaaaaaagggaaacaaatgttatcttaaaattattaatgaatattaaggagaagataacaaatgacaaaaggtacaccacatattcaaccaaatggagtaaaaattgctaaaacagtattaatgcctggcgatccgctacgtgcaaaatatattgctgataattttttagaaaatgttgaacaatttaacgatgtacgtaacatgtttggttacactggtacatataaaggtaaagaagtttctgtaatgggttctggtatgggtattccaagtattggtatttactcatatgagttatacaacttctttgatgtagatacaatcattcgtatcggttcttgtggcgcattacaagaaaatgttaacttatacgatgttattattgcacaagctgcatcaactaattcaaattatgtagatcaatacaatattccaggtcatttcgcgcctatcgctgacttcgagttagtaactaaagctaaaaatgtcgctgaccaaatcggtgctactacacacgtaggtaacgtattatcttctgatacattttacaatgccgatccaacattcaatgatgcttggaaaaaaatgggtattttaggtatcgaaatggaatcagctggtttatatttaaatgcgattcatgctggtaaaaaagcacttggtattttcacagtaagtgatcatattttacgtgacgaagctactacacctgaagaacgtcaaaattcatttacacaaatgatggaaatcgctttagaaatcgcagagtaacttatttaaattgactttaattgctctttaacaatgcgattaaactcaaaaagccaacacattctgggcgtatccccatttatgtgttggcttttatttatattattacttatctgtagattagcttaagtaagatttaaacatccaattatgtttatctactgatgtttgcatacctataaacatatcttctgatacatcatcgccagcattaccagcaatttcgattgcgttttctaattgttttgagatatttgtgaagtcttgtgataattcttcaaccatttgttctgcagagtaacctttcgcagcttctttaacaattgattgctctaagcattcagttaatgtacctacagggtttcctcctaccgctaaaattctttcagctaattcgtctacatattggcttgcttcattatataattcttcaaatttaacgtgtaatgagaagaagttaggccctttcacataccagtggaaattgtgtagctttgtgtaagctactgtccagtttgctacttgttgattcaattcttttacaacatcttgttgattactcatatttaatacactccttaaaattgtctacgtcttgcttgtttatattaattattatattataataattctaatctgtaaagtgtttttactctcttttttataattattctaatctaatcgtaaagtgttccgctatttaaatgcctaaattttaattcatcatctaatatatccattatcaattagcaagtatgttttatcaatcagtaagttttactttcgcattatcatctaaaaagaacgatttttcataatcatttggttggtgccatgttgttttccacattctatttctattattagcaaacattcgataaccgaaattacggactggtttaggtacaagccataaacctacgcccaataatttagttcgattaggtagtgctgtgattagtttaataatcgcctgcgattcaaaatatatacgatcacctttctgtaaaatcacactatttttatttgccgcttctggatgttgtttaaaaaattgttggccaacttcaccttttaacgtggcaaattgataatttcttggtaggtcatgttgaattaaccaaatgacatagttataacaatatatacagtttccatcataatatacgattggcataatttattcgctcctttaatagtacttatagtcatttttcctaatttaaaaacatttaaacaaggttgtcacttgataagtcctcgcgacacgaaattgccataaaatttatttttcagttttatatttattgtataatgtattttttatttactttaaatttctcaatctacagtgtaatcttatttcttattattaacttagcgtttggtcattcgtcttattcaacataccactggaaaactcatataaagttttaattctgtaacataaattcttttatattcatatactgtctttattatttattaaaataaaaacgagtaatctatcataagctcttaattagctcttatggttgattacccgtcattttttctttatgcggttattcaaatatgcaattatgcaatttttaatcctatccttacttcttttcaaaaactaccatatatcattagtcatgtttgactttgactatacgtgtgtattttaaaaactgctctgaatatttctccttaatttcctctaaactgtcatatgtaatacctacaatatgccaattaggattgaaataatagaaagaatctttttgtcgtgaccatttaatcatattaccgtctttattataacgtggtaatgttacttcatagccttctaacacattaatatacgtttggaaaatgtctgtatctatacgattaaaattatcaataactaaataacttttatcctttttaggcattaattgagtaataaacccttcacgatagtataatgcccctgtttcatttggtaaatacttgccataaagcatatcttctgaaaaatcaggatgacctgttgttataacaggatttgcattcgctttttgcaataagtcattagccgcttttaagccttcttcttttcgatctacaacaagtaaaataaatggctttaacgcttcttctttttcactttcaagcatatctggtttttgaaccatttcaaatggagatttcaatccattattatcgctcatttcaataattgcatcatactgtgcttgtgacatacttgcaatagcctgttttgcattttcttgaaggaaatataagtttttcaatttaggatgcttatttaatgtacttaatgtaatcggtgtaatgtctttctcataagacacttcaatcactgtactatttgttctaccaggaattggtggtttttcatgaatatgctttgatacttctccaattccaacgacagattgatttttcgttcgattataaaaaataatattgtcgccttcttctaactgagtataaaaatgataaccattacgtttaataccgttgtacgtgtgcgtataaatcgtatattggtttccaggttcaaattcttcagtttcagctaaaaagaaataacgcggtatcttaatttcgcctttaccaagaccacttattaaatcaaactcttctgcagtgatttgattgaacaatgtctctttcatattacttatacgaaattccaaagcttcactacgctttaaataatctgctgttaatggtttcaattgttcattaaaacgaaactgtacacgtattttattttgtgcacctgtttcaacactaataatttcaccacatccaagtagtccagtatccgtctgaacttgataaaagatgacttgatctcctactttagcctttttaaacgctctaaatccttgagatgggttaaaatgtgcgcctgattcaaataaagctgtttgtcctactaacggttcattatgattccaacggttatatccacaattcaaccaaaaataattcgtttctgctgtcatcttaatactccttaacctgaataaattttagaaacactatgaattacattcttttagtgtttcttatgcagttggacgcgtatgcgaacaactgtataccctttgttcactgcgattttaatcgcatttcctataacattgtagcgcccaggacattaatttacgtcccagacccttatcgttttcacttctaagtaagtcgaactattttgctttacaacaagtgcgactctaaatacagttggacacacatacgagcaactgtataccttttaatcagttttctatattttatttattatatctgtcttaatgataaaaattgttacaaacagtttaacatatttagctacctattttgcatataaaaaacatgcttgcatacactatgcaataaaaattacaaatttatatatgataccactatgcttgcttatctctatagcgccattgatacacatttttaaatatctatactgccgttagaattttatcatgtcttaattttcattaaatattaattacttcattttatataaaccaacaaaaaccccctcactactatgcaagtgagaggttatgttgatgtgctttattttcatcaatgtcattaacacaatcatatttcttctgttaatgcactgtattatattcaaacgcgctatcgacaattaatttgaagctacaaaggtaccgcataatggcagcacattaattaacaatgcgctaaactttaatgaggcgctgatttgcttgtctttaaaagtcaacatagcactgataattcctaaaatagctactatacgtggaattgtcatgctcggatactgcggtatatgtaagaaagcaccaagacctgctatcacaccacatactaacgcaatatatagaaattgcttcaaatcattcactcctaaattgttattacactattacacatagctaatcatcaatgtgaaatcaccttcaaagacactatccaaatcttcagaagtcaaaataaagtttgtaccagtagtcagtttgaaaatttcaccatcgacaatcatttgcccttcgccttccaacactgtaactaaacagaactctctaggcttcatataatttaacgtgccagaaatttcccatttaaccaatgtaaagaaatcattcgatacaatgtgtgtacacttatggttttcaataatttcgctttcaggcaaaatattaggtaatggtgcattgtactgaataacgtctaaagctttttcaatatttaacggtctatcattatattgattatcttgacgattgaaatcataaagtctatatgtaatgtctgacgattgcatcgtttcgtatgctaatattcctgaagaaatagtatgtactgttcctgctggaataaaatagaattctccaggttttactttaatatatctaagtatcgactctatcgttccgtgttgaacatgattcgcaacttcttctctagactctgctaatgtccctataactatttctgcatcttcttctgcatctataatataccaacattcagatttgccatattgcccgttttcatgctcataagcataagaattatcagggtgcacatgaatagaaagtgattctcttgcatccactattttagttagaagcggaaaatctttgcttgggaaatcaccaaacaattcacgatgttctgaccaaatacggtctaatgtttgaccttgatatggtccattaataatctcgctcgtaccatttggatgtgctgacacacaccaacattcccccagttgtatcattgtctaattgatatccaaactcacttagacgttgaccgccccataattttgtttttaaaattggttgtaaaaataatggcattgttgcacctccattgtgattaagtaagcaatagaactctgatgttgttgttccattatattttgattttgttctcatttacatcgtattattaacttccacatttcaaattaactattagtgattgtaccatatttactaacattgcagtactgccaattaaagcgcttcacttaaatttacagtactttaacattttcaaaaatttatagcatagagattatatctctcttacatttgtacatatttccctttaaatttactcgcccattataccaattaataaacaactttaatagttgtgccatacattgttcaaattctttgtaaaacgcatagacaatacgtacttattcatacttataattcatcattttcaaaaaataacgagttacgaaaaagtaacccgcttcaaatcatatttactatccttattaatccgtttcattttcaaattgagttaaagcatctttaatgtcctgatcaccactaataatttgaaactcttggtgattaaaatgattggatgtgacaatttcttttaatactgtcgcaacatcttctctaggaatttcacctttaccatcaaaatattgtgcagcttctatctttccagatcctgctgcatttgtaagtgcccctggatgtaaaattgtataattcaaacctgaacgtcttaaatagtcatcagcgtaatgtttagctattgtatatggctttaaatcaccgctatcatcaaaagcctgacgtctcgaatcatatgttgaaaccatgacatagtgtttaatattggcctctttactcgcaatcattgatttaacagcaccatctaaatcgacaataattgttttatctgcacccgtgttccctccagaacctactgaaaagataactttatcgaatggtttaaacgtctcagttaaagtctctattgaatcattttcaacatcaacaagaattgctttcataccttgtgattttaacgcattaagttgatctgattgcctaacaccagcagtaaatggtacattttcttttgctaattgttgcactagtaacgaacctacaccgccattagcacctataaccaaaatattcatttacaacactctcctatttattattctctatgccataccactttatgagatatgtaaaacttgttacaactataaaaatcaattgacatactactgggaacgtattaaattaatatatgaacaaatattcatatgaaaggattgtcatataatgtcagaacaatattcagaaataaatacagatacattagaacgcgtaactgaaattttcaaggcattaggcgattacaatcgaatacgtatcatggaattgttatcagtcagcgaagcaagtgttggtcacatttcacatcaattgaatttatctcaatcaaatgtctcgcaccaattaaaattacttaaaagtgtgcatcttgtgaaagcaaaacgacaaggccaatcaatgatttattcattagatgacatccacgtagcaactatgttaaagcaagccatacatcacgcgaatcatcctaaagaaagtgggttataatatgtctcattcacatcatcatcatgaccatatgcatagtcatgtaactacaaataataagaaagtattgtttatatcgtttttaataatcggtctatatatgtttatcgaaatcatcggcggtctccttgctaacagcttggcattactatctgacggtatccatatgtttagcgacacattctcattaggtgttgcacttgtcgcatttatttatgctgaaaagaatgccacaactacaaaaacatttggttataaacgtttcgaagtactcgcagcgttatttaacggtgtaacgctttttgtaataagtattttgattgtttttgaagcgattaaacgtttctttgttccttctgaagttcaatcaaaagaaatgttaatcattagtattatcggtttaattgtcaatatcgttgttgcattctttatgtttaaaggcggcgacacttcacacaatttaaatatgcgtggtgcttttctacatgttatcggagacttattaggttcagttggcgccattactgcagctattttaatttgggcatttggatggacaatcgccgatcctatcgcaagtattttagtttccgttattattttaaaaagtgcttggggtatcacaaaatcttcaattaacattttaatggaaggcacaccaagtgatgttgatatagatgaagttataactactattaaaaaggattcacgaatacaaagtgtgcatgattgccatgtttggacaatttcaaatgatatgaatgcattgagttgtcatgttgttgtagaccatacattgacaatgaaagaatgtgaattattattagaaaacattgagcatgatttattacatttaaatattcaccatatgactattcaattagaaacgcctaatcacaaacatgatgaatcgattatatgttcaggaacacatagtcattcacataaccatcatgctcatcatcacgcgcatgtacattaataattttaacctactgccattgcatcgattaaacttttcaatggcagtaggttttttatgtctttatggcgacttgtttggtctttgatgatgcaatgtttattaacaaattttcaactattatttcttacattagtcatatttttgacaatttactattataattctctaactttagtcactttaattaatttttattagatattaatatgaaaataacgtgttttttgttattgtatttatatgaagaaaaggaggcaccactttgtttacttactttaaatcagcatttaaaaatgctaaaccacaattattaataacattgatatatgcacttatagcatttgctgtaattgcagttgtatatttacttgctaatttccagcttgctaagtatgcacaaactattgcaatttattcacaatttgggcaaaaaccaccagtagatgcatatttaaaagttatcgctgtattacttatagcagctgtagtttcactgtttgttttagttcaaatttttatcggaattacaaatgttatgaaacgagcaatgagtcatgaaaaagtaaaatttaccgatttatttattgcatttaaaaaaggtaattatttaaagagcgttctgatcggtcttgtatctatagcaatgattatcgttctttcacttctgacatcattactatacaaattattttctccagtatcagaaatgattatgaattcagtacaatcatcatatgcagatagtacacacctgattggtattgctattacaactcaaagcatcataatcattgttgttttattgattaaagcaattattacttggttattgttaatacctattttcaactttatgactagtttcgttgaatcaactaacgataaagtaaaaacacacttagctaatggatttaaagcaatgaaaaatggtcaaaaaacatttttcaaatttttcattggaatactattattaaacttaattattattttatttaaaacacctgttggttacttgatttcatttaatacgcaatcactctctcaaagtgttgcagaaaatatcataagagtttatacagtaatgacaattattttattcgttgttattcatgcaatcattttaatgggtatcgttcaatattacttaaaacgtggtcaaaaaattactaaagataaagtaaaaacagctgacaagaataaaaaagttgtcactgaaccaaaaaatacaaaagtagaaaatgataaagtgacaacatctgttgaaacaaaaacagaaaaagcacaagattcattaaatgataatacaacaaaaacaatgacttcagataaaccagaagacaatcaaccaaaataaattttagagccccttacaactttagttgttaggggctcttatgcagttgatgcgtagcatccaactgtgttcctctatttttcaactttagttgttaggggcttctttctaaaataactaagtgaattatctatatatgaagaggtctccaatactttttatataattcgtgattacattctatacttttaattgtattttctgctgtatggaaagttggttttattaattctgattatgttcagaactacaattcataagaaaaatgtgttaaaatatatttgtagcaagtagaagcaaaagatgaaaatcattaactcttgaaacacaaaaagggcaacactcggaaacatgttaccctaatgagcccgttaaaaagacggtgaccttatattttatttaaaaatagccttcaaaaatgccggtcaaagcgaatagaaggttattttttatggtcttgagtactaatcaatactaaaccaatgattgttaatacaaccataagcatttcaaaatcagacatgctagtcctttctaggagtaacaactataaccataggcatcacccctttattaagagattagccaccatctatccaacttgctcaataaatattataacatgcacacttttaaacagtaattcatagtataagttttttcatttcttaatcaactcgataaacagttgagtgacatacccttgtctaactagctatttcttcccctgttatcgtttgttcatcatataaaaatttaatttctcattttttattctctggtaaagaggggcgcccgctttttcggcctctcgctcttgttgctgctaagtctattttatacactcacatagtaaattaacttctaatcctgaaaaatgcactcatcatcgtaaaaaacattttgcccattgtgtctttcgttgaaatgttcatgttactaatttgtaagtcaattccgttatcatcgaatcattgtgataattcaattaatagttttgtcgttctacctaaccgatcaagttgatagacaactaatgtgtcgctctctcgtaaataatttaaacacttaacaagctctgtacgtttgacaccacttattctttcactatatacacacccacacccaaattctttaagtgtatcgatattaatctttcgttgatacacgatcataaccaattttagccatttaaataaaacctctcttcaacatattatatttagttatgactcaaaactcattgccgtatttttgattttgtattaatatatcaaggctatcatcatctaataccaaatgaatttctccacttcgaatatcaatagcaacgtttatttttgattctaactttttcaaataatctatgtcagtaaatatgtacttagaaagataatcatcttcttttttaaattcttctttatcaattgtatatccgttctctaaaatttttgataactctataagagtattactcctactttctttttttacattagacactacatagtttatgaacttttcaatcaattgttcttccaaatcactataatcttgtgtgtcctttttaaataattcaaacataatattattggataaattttcattatatattaatcgctcgtacataccagaagcgctagagttgataaatctattcagatcgttttgtatttcgttcaaatctatattccctttactatcgtaatatgaataattactcattaatttttttaagaaatctctcaaaccaaagtaaagataaatatttgaatactttctggcattatcgtagtcttttacatctcttttatagtgatctatcaacatattcaattcgaaattatatccatgattaaaatcaaactcgccattgtcatattttctttgaaattcaaacttgtatatttctgcaactttatcatcgcaattttcatctatatagttttcaaccaaataataagcacgctcaagagaaatttcaccataactttgtataaaagaggttaagtactctgttttctttaaaatttcttctcctttcttaattggtatatatacatatggtaaatctaagttattaataatatgaaaattgtcgtcaatacgtttaattaagtcaggtttattacctgttgtttttataccaaaactttttaaaatactttgtaattcaggtcttgtctttttatatatactaacttcaaaatcattagtcgttgttaataactcagcttcaattaatttttttattgaattcataatttgaacatcattattagcaaggcacttattagcaaatatctcttctccaaccaatctatttacattagtgtgtaatactaataaatcacgtgcatttacgctcactagctttcatctcctcatttttgcttttcaaatttattaagtatgaataaaaaatacatccgaacaaacaaaatctctatattctaattcgatttacatagattatacactaaaaaaatgattctcaatgcaaatgaatgtgtctctcatagtctaaaaactcgtatgtttcgaattttatgattcattgataatagtaccagttaaaagaactaagattgtaattatccccccttaaaattcaagaatatattttcttaatctatcagcaagaggttatatttcaaagtgtttatttttaaaacaacatctaaaagccattttcataataatgttaaatcattagaatgtataaagattccaattaataaaaatagataaaatgcaataaagttccaaatacttattattattcatcacaaattacgtgatgccctctacaacactaaatcaaggatgatatttattttatatacattagcattcattgtttgcttacccacattatcctgtttagtcttttttataactctagtcttgaatgtcatatttacaaagaaaaaaacactaaaatatttaaaactaacactatttattcactttgttcttttatagcaccttttatgtttattttcttgtattcaataaatagtatggagatgataatttaaagtagatatatttgaagtatactatagagtaaattatattggggaaatatgtaaacgaaccggttgattttatagtggattaacacttcatagagaatataatcaagaacaaaaacagtcaataggtgtgaatttttttaaagacggatctgttgctactaaaaaaagaagtatacaattcaatagttaaaccttaaaacaagaaatattattcaaaatcaatgaatttcctatcttattagttttaacaatatttattctcatagagtttgtccaattaaatatagatgattcaaatatttataagcatacaaaagagcagtaagacattttctaatagaaaataactttactgctctttgtacattactcatcaactattgtaaattaaataataaataactacctattttattattcagctaaaaaatgctctgctaaatattttgctgcgccatcctcttcattcgtgtatgccgttacatctgaagttaatgcttggatttcagggcgtgcatttttcatagcaactgtataatgaccaaattcaaacattgctctatcattgtcgctatctccaataactaacgtttcttcttgatgaataccaaaatgtgcaatcatttctttaatgcctgtacctttatcagtttgataagccattgtttccgcattaaatcttgatgaatttgaaacactaatctgtagttgcacatgattttgctttaattcatctctaaatgctgttattttttctaaattagaactgaatagataaatttttgaatattcaccttcaggaaacttagttacccaatctatcttaccagcaagcgcatcttgtcttgaagaccattcactatgacttacgccattaataggatcttgactacgaatcatatctcgcatccatgtttcatcttcttttaaagaaactctattaccttcaaaaggaaatacctcataataaatttgttggcgcttagctaaattagtaatttgttgcacttgagccaatgataaaccatgcttgaagataatttctccatctacttctccaattgttccatttgaactaatgatgccattaaccgcaaaatcttgaggtacaagttgatgtatttcagaatgcgaacgtcctgttgccaaaaatactttatatcctttctctctcaattgattaatgacatctttcgtatacgttgatgcttgattattttcatgtaaaattgttccatccatgtccaaaaatattgcttttacgttatccatattgccctccactgtccattttatcttaattaaattttgtcattattacttattatttgcaaaatatttactctaacattgccatagaaaatcgattattccatctttgaactgctacatttttctggaaaaatcgtgacatgttttcagaagttaatatgtcttctacagcgccttgttgaatactttggccatcttttagcagtaaaattttggaaaagttagcagttatttcttcaataaagtgcgtcacataaatcatcgcaagcgttggatatgaatctgacaatgagtcaagtatacttaacaacgattctcgtgcaataaagtctaaaccagctgctggctcatctaaaattaaaacctggggttgccccattaaagctcgtgcaatcatcactcgttgtttttcaccggtagataaataaccaatatattgttgcgctttagcagacattccaactaatttaagtaattgatgtgcttcattacgtatctcatcatcaatatcttgataaacaccaattgatttaaaggcaccgcttatcaccacatcgattactctttcaccctcttgaaacttttccagtaaactatgagatacaaaacctatatgttgtcgtacagtctctgcagaataccctaccttgcctggcattttaccgaaaaggttaacagttccagatgttgcaggctcatacgcatttaaaatatttagaagtgttgtcttgccagcaccattcaacccatataatatccatttatcacctttagcaatttgccaagaaatcttttttaaaattgtttttccttgcttcattcgcccaatttgatctaattgaattaacatgcgaggtcacccctttattgctactccatacttctcataaaatcatattaacataacacccttaattgtcagactatttaaataaataaaacacttcatttttacgcatttctgccaaattaagatgaagtaaaagctaagtcgacctaaaaaagcacccttctagtcgattaatctaaaagggtgccatatactttaattttaatacatgattgattctaaaaaagtgaattattccacagtaactgatttagcaaggttacgtggtttatcaacatctaaatctctgtgtaatgctgcatagtatgaaattaattgtaatgcaaccactgatactaatggcgttaacaattcatgtacatgaggaatgacataagtgtcgccttctttttcaagaccctccatagaaataatacatggatgtgcaccacgtgctactacctctttaacgttaccacgaattgataaattaactttctcttgtgttgctaaacctacaactggtgtaccttcttcgattaaggcaattgtaccatgtttaagttctccaccagcaaaaccttctgcttgaatgtaagaaatttctttaagttttaacgcaccttctaaacttacgttatagtcaatagtacgtccgataaagaatgcattgcgtgttgtttctaagaaatctgtagcaatttgttccataattggtgcatcgtcaacaattgcttctattgctgttgttacttttgctaattctctcaataaatcaatatctgcttcacgaccatgctcttttgcaacgatttgagacaagattgataatactgcaatttgtgcagtatatgcttttgtagatgcaactgcgatttcaggacccgcgtgtaataacaatgtgtggtctgcttcacgtgataaagttgaacctgcaacattagtgattgttaatgatttatgacctaatttattagtttcaactaatacggcgcggctatctgcagtttcacctgattgagaaatataaacgaacaatggtttttcagataataatggcatgttgtagacaaactctgatgcaacgtgtacttcagttggtacgccagcccatttttctaaaaattctttacctactaaacctgcatggtagcttgtacctgctgcaataacgtaaatgcggtctgcttctttaacatcattgatgatgtcttgatcaattttcaagttaccttctgcatcttgatattcttgaataatacgacgcattactgctggttgttcatgaatttcttttaacatgtagtgtgcataaacacctttttcagcatctgatgcatcaatttcagcaatatatgaatcacgttctacaacgtttccatctgcatctttaataataacttcatcttttttaacaataacgatttcatggtcatggatttctttatattcgcttgtcacttgtaacattgcaagtgcgtctgatgcgataacattgaaaccttcaccaacacctaataataatggtgatttatttttagcaacatagattgtgtctttgtcttcagcatctaataaacctaatgcatatgaaccatgtaataatgacacaacttttgtaaatgcttcttcagttgaaagtccttgatttgaaaagtattcaactaattgaacgataacttctgtatctgtttctgaaatgaatgatacaccttgtaagtattcaccttttaactcttcatagttttcaataacaccgttatgaactagagtaaaacggccatttgatgattgatgtggatgagagttttcatgattcggtacaccgtgtgttgcccaacgtgtgtgaccgattccaacaggtccatcaaaatcgctactatcagcaactttacgtaattctgcaatacgacctttttctttaaatacagttgtattatcatcatttactactgcgatacctgcagagtcataacctctgtattctaatttttctaaaccttttaataataattctttggcattatcatagccaatataaccaacaattccacacataacgacattttcctccatattggaatagtacgcgtaaattatgatttattgccgataatttagattgacaatctgctttcataatataaataggaacatgctatcatcgcattcatccataacaaattaagcatagttatttttacaactatacaaattgctcacactgtactttccatattaatattttttatattcaatttctggcgatcttattaactttgtccattaagtcaccctaatgttttacttaataagctaacgaatgagccacatccgggatagcatccgccgatctattcgatcactatcctcctcgtctacaaatacatatattgcactctataaaggccactcatatattaacctttaatcttcaaatacaaatatttatttgcacaggcgctttaactgtactgccgaactttccccctttccattaatcattattgtacaacggtgttgttttgttttgcaaatattttcacaataaaattttaaaaatcctaaaacaatttttttgttttactttttcaaaatatctatactgtcacattgatgacactttatttaattttgtcacatttattttgacaaagttgatttttgtttatattgagtaacaagtaacctctctatacactatatatagtcacatatattaaaaaagaggtgtaaacatgtcacaaactgaagagaaaaaaggaattggtcgtcgtgttcaagcatttggatcattcttaagtagtatgatcatgccaaacattggcgctttcatcgcttggggttttatcgcggccatttttatagataatggatggttacctaacaaagatttagctactttagcaggaccaatgattacttatttaatcccattattgatcgcatttagtggtggtcgtttaatttatgatttacgtggtggtatcatcgcagcaacagcaactatgggggtcatcgttgcattacctgatacaccaatgttacttggtgcaatgattatgggtccacttgttggttggttaatgaagaagaccgaccaattgattcaacctagaacgccgcaaggttttgaaatgttatttaataacttttctgctggtattttaggatttatcatgacgattgcaggatttaaaattttagcaccacttatgaaatttattatgcatattttatcagtggcagttgaagcattagtacatgcacacctacttccacttgtaagtattttagtagagcctgcaaaaattgtatttttaaacaatgcgattaaccatggtgtattcacaccgcttggtgcagatcaagctgcaaaagctggtcaatcaattttatacacaattgaatctaaccctggaccaggtttaggtatcttacttgcttatatgatttttggaaaaggcactgcaaaagcaacgtcatatggtgctggaattatccacttcttaggtggtattcatgaaatttatttcccatatgtattaatgcgtcctttattatttatcgctgttattttaggtggaatgactggtgttgcaacttatcaagcaacaggatttggatttaaaagtcccgcgtcaccaggttcatttatagtttactgtttaaatgcacctagaggtgaattcttgcacatgttactcggtgtcttccttgctgcacttgtatcattcgttgtagctgctttaattatgaagttcactagagaaccaaagcaggatttagaagctgcgacagctcaaatggaaaatactaaagggaaaaaatcaagcgttgcttctaagttagtatcttctgataaaaatgttaatacagaagaaaatgctagtggtaatgttagtgaaacatcttcatcagatgatgatcctgaagcgctattggataattacaacactgaagatgttgatgcacacaattacaataatataaatcatgttatttttgcctgcgatgcgggtatgggttctagtgcaatgggtgcaagcatgttacgtaataaatttaaaaaggcgggcattaatgatattacagttacaaatactgcgattaatcaattgccaaaagatgctcaattagttatcactcagaaaaaactaactgatcgtgctattaaacaaacaccaaatgccatccatatttcagtggataatttccttaattcaccaagatatgaagaacttttaaataatctaaaaaaagatgatcaagcataataattaaataaattaaaaaatggaggataccgccatgttattgagtacacgtgaaaaagaaatgatagccctattgattaagtaccacggtcaatatatcactatacacgacattgctcagcaacttgcggtgtcctctcgtactattcaccgtgaattaaaaggtgttgaagcatatttaacttcattttcattaactttagaacgcgcaaacaaaaaagggctacgcattgctggcacagattctgatttaaacgatttgaagcaatcgattgcacaacatcaaaccattgacttatctgttgaagagcagaaagtaattattatatacgctttgatacaagccaaggagccagttaaacaatatagtttagcgcaagaaattggcgtttctgtccagactttagcaaagatgttagatgatttagagcttgatttaaataagtaccaactatctttatctcgaaagcgtggcgaaggcatttacttggtaggtactgaatcaaagaaacgtgaatttttaagtcaattaatggtgaataacttaaatagtactagcgtttattcagtaattgaaaatcattttgtctttcattcattaaatcaaatccacaaagactttgttgacttagagcgcatttttaatgttgaaagactattaatggactacctaagtgccttaccctaccaacttaccgaatcaagttatttaactttaactgtccatatcgtgctctccatttcacgtataaaaaatggagagtatgtcgcattaaacgatgatatttatgattctgtacaaaacacatttgaacacaaagtagcaagcgaacttgctgataaacttggtcaaatatatgacgtcacgtttaatcaggcagaaattgctttcattactatccatttacgtggagctaaacgaaaaaatcttaatgatacatcattaaataatcgttgtgaagaaaacaaaattaaagcgtttgttaacaaagtagaaatgatttccggtatgacatttgcagatttggatactttagtagatggactgacgctacaccttaatcctgcaatcaatcgtttgcaagctaatatcgagacctataatccgttaacagacatgattaagttcaaatatccaagactatttgaaaatgtaagattagctttaaatgattgttggcctgatttgatttttccagagagtgaaattgcttttatagttttacactttggtggctcgattaaaaaccaaggtaatcgatttttaaacatattagtcgtttgcagcagtggtatgggaactagtcgtctattatcaactcgtctagagcaagtttttagtgagattgagcgtattacacaagcatcagtcagcgatttgaagtcactagatttaagtcaatatgatggcattatttctactgtgaatttagacatcgactccccctatttaacggtaaacccattattaccagatagtgatatcagttatgtcgcacagtttttaaatacaaagtctacgttccaagagacgcatgataaatcatcaaacatgattgataaggatgatgttcatgttgaaacgaaagatgttgatggcaacacatcttttgaaaatgaacaaacttcatacttaacttcagttttcgaaaaacatttaagtgacgaaaaatcagaacaattattgcatcatatgcgttcgggtttaactttgcttgattcagtgaaaatagttagtaccgaagttaaacagtggcaaacatatatcgcagattatctatatcaatgcgatgtaataaacgatccaacgtcattcgctgaactactagagcaacgattgattgacaatccaggatggatattaagtccatatcctgttgcaataccacacctaagagacaatatgattaaacaccctatgattctaatcacagttttagaagaaccgttaacattgcctagtattcaaaatgacaatcaaacaattaaatatatgatttccatgtttatttctgacaatgattttatggcatcactggtaagtgacttgtccgaatttttaagtttgaaattagaatctattgatacttttatggaaaatccacaggaacttgaaacattattaagaaacaaatttttagaacgaattaaaaaacaatttatttaggagtgtacaaaatgagcgaattatttagtaatgacaatatctttttaaatgtaaatgttaacagccaaaatgaagcaattgaaaaagcaggtaaagccttagttgatagtggtgctgtaacagatgcttatattcaagcaatgaaagatcgtgagcaagtcgtatcaacatttatgggaaatggcttagcaattcctcatggcacagatgaagctaaaacaaatgtgattcactcaggtttaacattattacaaatccctgaaggcgttgactgggatggcgaagtagttaaagttgtcgtgggaattgctggtaaagatggcgaacatttagacttgttatctaaaattgcaattacatttagcgaagaagaaaatgtggatcgtatcgttcaagcaaaatctgcagaagaaattaaacaagtattcgaggaggcagatgcataatgaaagcagttcactttggtgctggtaacataggtcgtggtttcattggttatattcttgcagacaacaatgttaaagtaacatttgcagacgtcaatgaagaaatcattaatgctttagctcatgatcatcaatacgatgttattttagctgatgagtctaaaacaacgacgcgcgtgaataatgttgatgcaattaattcaatgcaaccttctgaagcgttgaaacaagcaattctagaagctgatattattacaacagctgttggtgttaacatactacctattattgctaaatcttttgcgcctttcttaaaagaaaaaacaaaccatgttaatattgttgcttgtgagaatgctattatggcaactgatacattgaaaaaagcagtacttgatattactggccctcttggtaacaatattcattttgctaactcagcagttgatagaattgtaccattacaaaagaatgaaaatatattagacgttatggttgagccattttacgaatgggttgttgaaaaagatgcatggtatggtccagaactaaaccatattaaatatgttgatgatttaacaccatatattgagcgtaaattattaactgtgaatacaggacatgcatatttagcgtatgctggtaaatttgcaggtaaagctacagttttagatgcagttgaagatagttcaattgaagctggcttacgccgtgttttagctgaaactagtcaatatattactaatgaatttgattttactgaagcggaacaagctggttatgttgaaaaaataatagatcgtttcaacaattcttatttatctgatgaagtaacacgtgtcggacgaggtacattacgtaaaattggccctaaagatagaattataaaaccattaacatatctttataataaagatttagaacgcactggtttattaaatacagctgcattgttattgaagtatgatgatacagcagaccaagaaactgttgagaaaaataattacattaaagaacacggtttaaaagcgtttttaagtgaatatgctaaagttgacgatggcttagccgatgaaataattgaagcgtacaattcactttcataatttattgagctttgtttgaaacaagaagtttccaacgttattcgttaacaatcagtaataatgtagtagttcccttgaattaacaatattaaatttctgaacataaaaaatactcccttcaacatagacacttaacttgtgttatgtatgaaaggagtatttttgcgttaataatttgttttattttcgagccacagccacctattcaatggctattggtcattactaaaacaaattcatattaactgttagacttggttacttagtaaggaatatttccctatgaaataactagatgttcacattcttgaataaattttattcttcagtttgttggtctttcttagtgaatcttctaattaagaatgccatacctgcacctagagctaattcagcatatggtaaatcgtcattatgtgacataccagtatctggtaaagttttagcttgttgtttagctttattaacttttccttgttgagctgattttgtcttagcttggtggtcgtcagtgttagttacattaagcatatcttgattagcactattgcttccatttgaaactgtagctggagatgcattggcaccgtcgttttgcgtagctttattgtttgcagctgaaccaactgatttttgcgtatcattagtatctgctgttgccgtatcatctttttggctaacattagttgaagtcattttttcttttgcttcagaagatgcagatgttgatggtttattcgaaacttcagtatcagctttgcttggcgatttatctgcttcgttagatgcaacgttagtttcagacttaagttgtcctgcatcagtttgatttgtcgtactttcttctttatcttttgatgtattagaaggtacatttggttctgttatgtctgctgaaggcaatgtttcagttgttgattcaaccatactttgatttgttgaatcactaccatctttttctgccttagctttattttcagattttggttgtgcaaccttgtcattagttgattgagattcagcactattatttacttcagcattttgttttgaatcatttacagatgcattatctttgctatcagcagatgatgctgcttctgtgctcgcagttgttggagccgttgctgttgatcctgttggtgcattctcgtttgttgctgtagttgtactattgttatttgttgtgctttctgctggcgttgcattatcagtttctgttacaggtttatcagttgtgccgttattagttgattctacttctggtttactagttacatcgttatccattgtcggactgtttgttgatgcatctacactagaattgttattagcttgcggtttatcatttgcatcatcagttgctgatgttgctgttgtttcacctgttgccgcatcactattatttggtgttgtcggagaagcgtctgctttgccattagctgtcgtctcagatacgttaggttgtccagtattttctggtgttgcattagcatttgaatttgctgttgcatcattattatctataccattattagtatcattagcatctggatcattctgaggcacaatcgcttcaattgcaggtatcgttacattttgtaattcagcaacttctgcatttgtttgtgttttatctaatttatcagcaaatctgtcaaaatatctacctaaatccgtacgtgcaatttctttcgccgatgcatctgcatctgcatttttaattatttctatttgcttgttaaccacttctctgattgcttccaaagcatttttcttaacttcaggattaatacgttgtgctttaagttgttcaagcgcactatttttgacagtagcgatttctgcatttgtagtttgatcagaaatatcttcagttgcttttgataaaatgtcttctaaagcattcgtaaacgcttctttttcttcagttgtagcatcagcgttgacatttacacctgcttcaatctggtctagtgcagtttctaattcttcgatagctttttgtttttctgttgagtcgatttgaatgttatcaaatgcttcaagtccttgagctttcgctttttcaacttcagcagttgttgttgcatcagtaataccttgtttagcttgatctgtaatttgtttaatcattgctaatgcttcagttttttcttcagcagttaactggtcactttgatcaatagattctttcgtatcttctgctttaacttcaatagcttggttcgctttaggtttaacagtagcatctacttgaatagcatcaattgctgctttaccttgtgttaatgcatcatcaacgtcaccattatccacaccattattaatgctttctaatgcagtttgaacattttggtcaacttgcttaattgcttgttgcttttcatcttgtgttgcattagtgtcagctgaaatattatttttcttctgatctgcataagcatataaatctgttgtagctgattcttttttacctgttggaattgtgtaatcgttaatattatctaagtcattatgaatttgaacttcaatgtcatctttagaagtagcttgattaacattttgatccgcagtttgttttaattcagcaagtttttgtttcgcttcagcaatttcacttgaagtcgatgcgttagagttatccgcttcgtttactttagcattatatgcatcttcaattttagctaaagcatcttttttgtactcactaaatgttttaactgcattaattttagcttttccttctttaactgcattatcaacatattcatttgttgatgattgatcgacatttgttttcgcttgatttaattcagtatcaacttcttgttttgcatcattaatttcttgttgtgatgcatttggtgtttgttctatttgtgttttcttatcagctgcagcttgatctaattcttttttacctgctggtttcttaacaggatttgcatgaagttgttgaactttttgtactgctgtatctttagcagtagttacatcacctgtagtagttgctgcattaatattatttaaaccttcttcatatgctgctctaactggtccaatatcgttacctttttcttcattagtagtctcattattattaagtatttcagttattttattttgcatttcagttagcaattccgctcttgcattcgttttaacatctgttgatgcttgaattgggtcaattgcttgaattgcattatcttttgcagtgtttacatcatcgattgactgtgcattttcaatattttgattaccttgtgttaattgtgcgtctacttgttgatttgcttgttctttttcttcagtagtcgcatctgcagtttgtgcaataagcgctttttgttcgtttgcttttgttgctaattcatctttcgcaacatctttaattgttgtatctgcagtaataccttgaatatcagcaactgcttgatctttaatttgcgtaacatcattagttgtttgtgcatttaagatatcttgatacgctttttctttagcttttaaaactaaatcttttgctgcatttttctcttcagttgtagcaccagttgtattatcaattgcttgattttgagttgtcacagcttgatcaacatcatttttagcatttgatttaaccgctgttgctggttgcgtgctttgaattgaattctttccagcgtctttcgcctgatctacaccattatcatcagttgcagctgtaatattatttttcgcgtctgtaactgctgttgctaattgttgaatagctgcttctttttcttctgttgtagcgttctgatcattattgataacatttgtttgcgttgcttgtaattgatcaatttcatctttagccgcttgtttcttcacaacttttggtgttaccgcattaatcgctgcttctgcatttgctttagcttcatcaacttgtgcgttagtagttgctgctgaaatggcttgatttgctttaccattttcagtatttgcttcagcatcagctgcttgtttttcttcatctgttgcatctggcgtagcttgaatctcttgcaatttgttatttaaaattgctgtgatttcattacgtgcagttgcttttttattaactgttggtgttacttgatcaatactattttcacctgtcgttttcgcttggtctacatcattttgactattagcagcttcaatgttgctatttgcttgtgtcacagcattatctacgtccgcattagccgctgcaatttcttcagcagtaatgtcttgcgtttgagcgattgctgttttacgttcattcgctttcgtagcaattgcttctttcgcattatctttagttgttgttgctggctgaatcgcttcaattttagcaattgctgcttttttagccgcttcaacttccgcatttgtatgtgctgcatctattgcggcatcagctgttgttttttcagtttgaacttgttgtttagcagctgctttttcttcagttgttgagccgttatttccatcaattgctgtttcttgagcttgtactttatctgcaattgcttgttttgctgctggtttaacatttgcatcaggtgtaatggctgcgattgtagcttcatttgtagtttttgcattatccacatcattgtttgctgcagcattatctatatcagcgtttgcagtaactactgcttgatccactttgtctttcgctgcttgttgttcttcagtagtcgaatcattcattgcttcaattgctgttttacgttcacttgctttttgagcgatttccgcttttgcatccgatttcttagttgtggcagcttgaacttgattaattgcagcaatactattgtctttagctgttgttacatcactgtttgtatttgcagcatcaagatttgttcttgcttcttgctttttagtatctaattctgtatatgcagcttgtttttcttctgtagttgaagcattgctattttgaatttcttgtttacgtgtattatatgcgttttctacttccgtatcagctgcaggtttaacttttgcttgtgtttgaattgcattgattttatctaatacttttgattttgtatcagcaacttcctgttttgatttaacaacttggatgtcatgtaaaccttgcttttgagctgcatctactgctgcatcagcttctgctacttcttcatttgttgcatttgaaactgtagcattttgagcttttctagctgttgcagcttgtttaacttcattataggcatccatttttgtttgcgtagagtcagtaatattttcaatttttgagatttcttcgtttttaactctttctaaatcttgtgcagtcgttgtcgcttcaattgctttaacaccagaaactttagctgcattaatacgttcaatagcttccgctacttcttcatttgttgtatcaggatttaaaggtgcttgatcaatttgtgcttgaacaacttcgtcaaattcttcaagagctgctgctttagctgttgtagcaggtgtagtttgattaatatcattgattgcttttgttttaatggcttctacttgtgcatttgttgttgctgcatcaatatctttaattgcctttgtttcaattttaccaattttatcatttgctacatctttttcatcttgtaatgatgcatttgactttttaatttgttgtttacgagttgtaactgcttggataatatcttgtttcgcttgaggtttaactgttggtgtaatcacatcttgttctaacactgcgataccattatctttttcagttgtgacaccttgtgctgtagtttgtttattaatttctgcgattgcattatttttatcattgttaattttagttacaagtgctgcaacttcatcttgcgtaacttttttactttgttgtgctgctgtaaccttttcttgagctttagtatctaattcagcaattgctgcttgattatcaattaatgcagcttgtaatttagttactaaaccatcaatatccgcttgagatgcacgatttgcagttttaacatgattcgcatcttcatttaaaatagtatctgcttgttgtttaagtttattgtattctgcaattgatgctgttgtgtaatgactattatcaacttgtgagtttacttgttgttgcaacgcatctttgttcatttcaaccgctactgaaaatggatctgcagttagtgtaacttctggttgcgcattattaattacaacatctgaagcagtacgatatgttaatttttcattaaaatcaatatttttaggtgtatcgatattcgcaacattaactttatatgataattttaaagatttatctgggaataaaacttctttagtgtgtgtaccacgtgccgttgtcacaccttggcttgtaaatgtaactttatttgcattttgatcataattaacagtcatatttttcaatactgtactgtcttcattaccattagggaatgttgtagttaatgaattattaacgtaagttacaccttgtggtaatgttacttcatatttaaattgatctgcttttaatgaagcaccaaaattaccattgttaccgatttcagtattaatagtatattctttattgttagttgctttcggtgctaaatctctatttttgacatataaatgtgatcctgagaatagacctacattatcaatgaatgaatagtatttataaccatctttatttgttgtaattcttgaagcatcagcaactgctgtattgtcaggaataaattgtaaatctaaacgatcagcatcagttggtactttaaataaatgtgcagtaccagtcttagcaacatttacagttgctaattcagtatttttcttagcatctttaataactaaatttgttgcaccttgcttactattcgtttgcatagtagtaaagttaataattaattctgaatctggttttacatttacagtttttgaaataccgttaaagttaccatgatctgtagaatcatttgcattcacacgacctaatgcagccacgtttcctttagcttgatagttttgagggttattcttatcaaacatatcgcttcgtcttaattctgagttaacgaaaccaatcttaccgttgttaattaatgaataaccatttactttatctgtaacagttacagttggatcctgtctattctcatctgttgatatggcaggatcatcaaatgttaatgtcgtattaatactgccttcaccagtattgctagcatttggatcttgagtttgtgcgtttgctgctacaggtgctgctggttgcgctgctgctggagcattcgctggctgtgtttgatttgccggtgttgcattattattaggtgttgcttggttatttccttgacctgcttggtttgccggtgttgcttgatttccaggttgtgcttgtgcagcgttattcggatcagcttgatcaccttgtccagctggttgtgtatttggttgtgctgctcctcctgctggattagcctgtccaccttggtttgctggttgtactgctggttgtccttggttggcaggtgcagctggctgtgctgtaggattagcttgagcaccagcatttgcgttaggctgtgtattggcatcagctggttgtgctggttgattttgtgcaggctgattttgctctgctgcagacgctgttgtcgggttagtagatataaaagtaacagtggcaattaaagctgaaaaaataccgacattaaattttctgatactaaatttttgttgtctgaataaattcattaagtcatcctcctggttgattattctcgctgttaaatgatttcacttaatcaactgttaagataagtagtagcatctgcgttaaaaacacaaagcaactctatctaattaaaattaattttatcatcattatatattgagtaccagtgtattttatattacatattgattactttgtttttattttgtttatatcattttacgtttgtactataaattatttctacaaacacaaaaaaccgatgcatacgcatcggctcatttgtaatacagtatttatttatctaatcccattttatcttgaaccacatcagctatttgttgtgcaaatctttcagcatcttcatcagttgctgcttcaaccatgacacgaactaatggttctgttccagaaggtcttactaaaattcgaccttctccattcatttctacttctactttagtcataacttctttaacgtcaacattttcttcaacacgatatttatctgttacgcgtacgttaattaatgattgtggatattttttcatttgtccagctaattcacttagtgatttaccagtcatttttattacagaagctaattgaataccagttaataaaccatcaccagttgtattgtaatccatcataacgatatgtccagattgttctccacctaagttataattaccgcgacgcatttcttctactacatatctgtcgccaactttagttttattagatttaattccttcttgttcaagcgctttgtaaaaacctaaattactcataacagtagaaacaatcatgtcattattcaattcttgatttttatgcatttcttgaccaataataaacataatttggtcaccgtcaacgatttgaccattctcatctactgctatgattctgtctccatcgccgtcaaatgctaacccaaaatcactttcagtttcaactactttttcagctaatttttcaggatgtgtagagccacatttctcattgatattatatccatcaggactacatccaattgtttcagtatctgcttctaagtcaccaaataagaatggcgctagtgatgatgttgaaccatttgcaccatctaaagcaattttcaaaccttcaaagttaacatctactgttgattttaaatagctcaaatatttttgtgccccttcaaagtaatctgaataatgtacaatatcattgccaactggtcttggtaattctgggttttcttgatccaataatgcttcaatttcattttcttgttcatctgatagtttaaaaccatctgatccaaagaatttaataccattatctgcaactggattatgagaggctgaaatcattacacctaactctacacccatatcgcgtgttaaatatgcaacacctggtgttgaaataatacctaatcgcatcacttctgcaccaattgaaatcaaaccagctattaatgctgattctaacatttcacctgaaactctagtatcgcgacctacaagtacacgtgggtgtttttcacctttattatgtgctagaacatagccaccgtatcttcctaatttaaatgccaattcaggtgttagttcttggtttgcgacacctcttactccgtctgtaccaaaatattttcccattgtttactctcctttaatttagctatttattttacatttatataagccttcgtttcacttggttgtgctttagtgacatgttctggtaaattgatttttacagtcttttcagttgattctgaaataccatctaaatctacttctgcatcaacttcgcttatattttgtaagtcatctcgactaccgaagatttcaatttctttatcttctaaatcaatcgaacttaactctttatcatctgctaaactacctttctgtttaacatttactttaacctttttgctaaaaggctctactttaacttgtaaattcacttcattaggttgaatcgatacatttaatttattcagttttttatcaaaagccgttacttctgcgacatcttttgtgtcaccattaatctttttattagttttaaaagtggcttttaaataagcgatatcattcaattgttcttctccacctgttactttaactgtttgtggtgaaacttcttgctttgtaattttataaagtggatcaatatcactctgacttacatcaggttgaactgtcatctttttagttactttgttttcaagcgtaatatttgctaatttaggttttacagaataatgaatgtcatcagctaaccctttaacttgatacttctcttgatattttccagctttagcatttgataaatcaatcactactcttaaatcttctggattttcaatttttattatctttgattgtggtcctgaaatagtcacattaactgtttcaggcgcttttgttaaatgcaaatctttagtgttataaagaatttcaacgggtacatcttgaatcgttttactagacttttgaccaagattaccagtgttaaagatatttccaaaaacattgttaacagataaaaagaaaaacaatgccaaaagaaaggcaataaatctcaagccccatttactttctagcatattatttcacacctttcttttgaaagcgtgtgccaaaccaatgttcagcaagcaactcttcaaaaatttcgtttgaaatgtctcgtcgtaattttccatcaaatgttaccgaaatatcaccagtttcttcagatacaataacggtaaatgcatcagatacttctgaaataccaaccgcagctctatgtcttgtacccaaacttttagatatcttaggactatcagacaatggcaaataacttgctgctgctgcaatcttcgtgccttgaataatcattgcaccatcatgtaaaggtgtgttaggtataaagacattaattaaaagttcttgcgaaatatttgaatccattgcaatacctgtttcaatataatcttgaagacctgtttctttttcaaagacaattaatgcacctatacgtcttttagccatatattgcacagcctttgaaaccgattgaatcaatttctcttcatctttactatacgtattagaagtatagcgttttaaaaagctacctctaccaagttgttctaacgcacgtctaatttctggttggaatattactattaaagctaataccccccattgaataacgatatcgaataatttagatgttgcagtcaagttcaatatcatacttatctgctgaccaataacaattactaatatccctttaagtaattgtatcgctttagttcccttaaagaccgtgatgagaagataaagtacataccaaactatcagtaaatcaaggatactcgttacaatttttaacgtactgaggttttgaaaaaagttggaaaaatccataacatctcctccgggtaatatttttccataatacccattataccaatcatttacatcactgtcatacgaacatatatttaaatagaaaaaaattattttaaagattataactactcttaatcattttagtgaattaaaaaaagtagtgcaaaaagcaaaatatactttatacactacaaatcatttatttataataaagtttcaccaaaaaatgttccaactaatgaaaccgcttgttcagcagtatgattattactgtcaatcaatggatttacttcaactaaatccattgaggaaattaaatgtgattgatgcagtaattccaatgcaaaatggctttctctataactaagaccacccaaaactctagtaccagtgcctggcgtttcaagcggatctaaagcatcaacatctaaagataaatgaacgccatcaacattgcgtgacttcaaatattctattgtattttcaattacttcctttatccccaatttatcaatatctgacatagtaaatgttttaatattatgatctttgataaattgtctttcacctttatctaaatctctcataccaattagtacgatgttttctggcttgattacattactatttaattctaaaagttctttgggaccttcgcctgtcaaaatccttagaggcataccatgaatatttccacttggtgactcttcaggtatatttaaatcaccatgtgcatcataccaaataacacctaaattattataatgtttacttattgctgatactgaacctaccgcaatagaatgatctccaccaagaactagaggaaatctgttattttcaattgatgctgaaacctctttatttaatttttgattaacatctataatttcatcataatttcttaatcctttttgttcactatgaaatttttcaatgttcacagcaggtaccttaatatcccccttgtcatatacatcaaggtctaattgctttaatcttgaaattaatccagcatatctaattgctgttggtcctaaatcaacacctaattttctttgtccaaatgttgatggtgcacctataatatcaattgcttttgtctttgtcataagcgtccccctttgctctatgtaattaaagaataatgtatgcgcttaccattatcaagcaatagctacacatataatctgtttatcttattacttcataaaaaaaggttcttcatcttttatggtgggaaggtaaaacttcctgctttttttaatacacaaaaagcgcaattgcctctataatttaaagtgaccaaacccaaactaaaggagacaagtgcgcctatgtgtaatgataccttagaattactaagaataaaagatgaaaatataaaatatataaaccaagaaattgacgtcattatcaaaggaaaaaaagcaacagtggttaatgctgtactaacgtataagccttcggcctgttattgttgtggagttaaaaatgaaggacaaattcataaacatggtaagcgtgtttctcgtattactttacttaaaactcaagggtataacacatacctcaacttagctaaacaacgttttaaatgcttagaatgcaatggcacttttactgctaaaacgtcaattgttgatgagtcgtgttttatctcaagatgtgttactcaaaaagttatagaagaagctactaaagttaaaacagagattgatactgcagaagataactgtatctctccatctactgtaagtcgtattagaactaaagcggctaattcattacgaattaaaccctttaattgtttgccagaacacatcgctatggatgaatttaaaagcgttaaaaatgtaactggatcaatgagtttcatttttatagataatgatactcatgatgttatagatattttagaaaatagaactacaagattcttgcgtgcctatttcgagcgattcgatttaaaaaatcgacaacaagttaagacggttactattgacatgtatgaaccctatgtccgattatttcgcgacctatttcctaatgcagctattatttttgacagattccatatcgttcaacatttaaatagagaacttaataagtatcgtgtacaagttatgaatgaataccgtaataaaaaaggacctgattatacaatttttaagaataactggaaagtcctattgatggatactagtaaaaccatatttagtaaatacagatggaataaatcttttaaggcttataaacgctcatctgacattgtagaattcatgctttcaaaagacgatatactacgacactcctacgaacttgtccaaggattacgaaaagacctaaggttatgtaattggcctaaatttattaatcgtttaaattcagttagtaaaaagtctgtgagtaagggtgtatggaaagtggttaaatattatagaaaacatcaaaggatgttaagaaatacaatttattacccagcatttaataatggtgctatagaaggaattaataataagataaaattaatcaagtgaatttcttttggttacagaaatttcaacaactttaaagcacgtataatgatgattttcagcttgtacaaaggagaaaaaaagaagacaaccaagcccaataatggactggccgcctaataataaaagctctaaaagttgtattttaaaaatagttctttaaattatatacccaccacatttggtggagaacctaaaaaaaagcacttcccaaaaatggaaagtgcaagtagtgagccatagaggattcgaacctctgaccctctgattaaaagtcagatgctctaccaactgagctaatggctctaatggctgggctagctggattcgaaccaacgagtgacggagtcaaagtccgttgccttaccgcttggctatagcccaatatatagatggtggaggggggcagattcgaactgccgaacccgaaggagcggatttacagtccgccgcgtttagccacttcgctacccctccagcttattcatataatttaataatcaaaatggtggagaatgacgggttcgaaccgccgaccctctgcttgtaaggcagatgctctcccagctgagctaattctccaaaataatgactcctacgggactcgaacccgtgttaccgccgtgaaagggcggtgtcttaaccgcttgaccaaggagccatggctccacaggtaggactcgaacctacgaccgatcggttaacagccgatagctctaccactgagctactgtggattaatattatgcctggcaacgttctactctagcggaacgtaagttcgactaccatcgacgctaaggagcttaacttctgtgttcggcatgggaacaggtgtgacctccttgctatagtcaccagacatatgaatgtaatttatacattcaaaactagatagtaagtaaaagtgattttgcttcgcaaaacatttattttgattaagtcttcgatcgattagtattcgtcagctccacatgtcaccatgcttccacctcgaacctattaacctcatcatctttgagggatcttataaccgaagttgggaaatctcatcttgaggggggcttcatgcttagatgctttcagcacttatcccgtccacacatagctacccagctatgccgttggcacgacaactggtacaccagaggtatgtccatcccggtcctctcgtactaaggacagctcctctcaaatttcctacgcccacgacggatagggaccgaactgtctcacgacgttctgaacccagctcgcgtaccgctttaatgggcgaacagcccaacccttgggaccgactacagccccaggatgcgatgagccgacatcgaggtgccaaacctccccgtcgatgtgaactcttgggggagataagcctgttatccccggggtagcttttatccgttgagcgatggcccttccatgcggaaccaccggatcactaagtccgtctttcgaccctgctcgacttgtaggtctcgcagtcaagctcccttatgcctttacactctatgaatgatttccaaccattctgagggaacctttgagcgcctccgttaccttttaggaggcgaccgccccagtcaaactgcccgcctgacactgtctcccaccacgataagtggtgcgggttagaaagccaacacagctagggtagtatcccaccagcgcctccacgtaagctagcgctcacgtttcaaaggctcctacctatcctgtacaagctgtgccgaatttcaatatcaggctacagtaaagctccacggggtctttccgtcctgtcgcgggtaacctgcatcttcacaggtactatgatttcaccgagtctctcgttgagacagtgcccaaatcgttacgcctttcgtgcgggtcggaacttacccgacaaggaatttcgctaccttaggaccgttatagttacggccgccgtttactggggcttcgattcgtagcttcgcagaagctaaccactcctcttaaccttccagcaccgggcaggcgtcagcccctatacatcaccttacggtttagcagagacctgtgtttttgataaacagtcgcttgggcctattcactgcggctcttctgggcgttaaccctaaagagcaccccttctcccgaagttacggggtcattttgccgagttccttaacgagagttcgctcgctcaccttagaattctcatcttgactacctgtgtcggtttgcggtacgggcacctattttctatctagaggcttttctcggcagtgtgaaatcaacgactcgaagacacaatgtcttctccccatcacagctcagccttaacgagtaccggatttgcctaatactcagccttactgcttagacgtgcaatccaatcgcacgcttcgcctatcctactgcgtccccccatcgattaaaacgattataggtggtacaggaatatcaacctgttatccatcgcctacgcctgtcggcctcagcttaggacccgactaacccagagcggacgagccttcctctggaaaccttagtcaatcggtggacgggattctcacccgtctttcgctactcacaccggcattctcacttctaagcgctccacatgtccttacgatcatgcttcaacgcccttagaacgctctcctaccattgtccaaaggacaatccacagcttcggtaatatgtttagccccggtacattttcggcgcagtgtcactcgactagtgagctattacgcactctttaaatgatggctgcttctaagccaacatcctagttgtctgggcaacgccacatccttttccacttaacatatattttgggaccttagctggtggtctgggctgtttccctttcgaacacggaccttatcacccatgttctgactcccaagttaaattaattggcattcggagtttgtctgaattcggtaacccgagaggggcccctcgtccaaacagtgctctacctccaataatcatcacttgaggctagccctaaagctatttcggagagaaccagctatctccaggttcgattggaatttctccgctaccctcagttcatccgctcacttttcaacgtaagtcggttcggtcctccattcagtgttacctgaacttcaacctgaccaagggtagatcacctggtttcgggtctacgaccaaatactaaacgccctattcagactcgctttcgctacggctccacatttactgcttaaccttgcatcaaatcgtaactcgccggttcattctacaaaaggcacgccatcacccattaacgggctctgactacttgtaagcacacggtttcaggttctatttcactccccttccggggtgcttttcacctttccctcacggtactggttcactatcggtcactagagagtatttagccttaggagatggtcctcccagattccgacggaatttcacgtgctccgtcgtactcaggatccactcaagagagacaacattttcgactacaggattattaccttctttgattcatctttccagatgattcgtctaatgtcgtcctttgtaactccgtatagagtgtcctacaaccccaacaagcaagcttgttggtttgggctcttcccgtttcgctcgccgctactaagggaatcgaattttctttctcttcctccgggtactaagatgtttcagttctccgggtgtgccttctgatatgctatgtattcacatatcgataacatgacataactcatgctgggtttccccattcggaaatctctggatcaaagcttacttacagctccccaaagcatatcgtcgttagtaacgtccttcatcggcttctagtgccaaggcatccaccgtgcgcccttaataacttaatctatgtttccaccatttttataagtcaaacgctcacatacggcttcgttttcattattttaaatgctcatttacataagtaaactctgctttaaaataatttaactcattgtctgctaaacgttttcttttataaaaagatttaaacgcgttattaatcttgtgagtgttctttcgaacactagcgattatttcttatgaattcaagcttatttaaaactctttattcactcggttttgcttggtaaaatctatattttacttacttatctagttttcaatgtacaaataatggtgggcctaagtggactcgaaccaccgacctcacgcttatcaggcgtgcgctctaaccagctgagctataggcccatttttttgaatgttaaataaacattcaaaactgaatacaatatgtcacgttattccgcatcttctgaagaagatgttccgaatatatccttagaaaggaggtgatccagccgcaccttccgatacggctaccttgttacgacttcaccccaatcatttgtcccaccttcgacggctagctcctaaaaggttactccaccggcttcgggtgttacaaactctcgtggtgtgacgggcggtgtgtacaagacccgggaacgtattcaccgtagcatgctgatctacgattactagcgattccagcttcatgtagtcgagttgcagactacaatccgaactgagaacaactttatgggatttgcttgacctcgcggtttcgctgccctttgtattgtccattgtagcacgtgtgtagcccaaatcataaggggcatgatgatttgacgtcatccccaccttcctccggtttgtcaccggcagtcaacttagagtgcccaacttaatgatggcaactaagcttaagggttgcgctcgttgcgggacttaacccaacatctcacgacacgagctgacgacaaccatgcaccacctgtcactttgtcccccgaaggggaaggctctatctctagagttgtcaaaggatgtcaagatttggtaaggttcttcgcgttgcttcgaattaaaccacatgctccaccgcttgtgcgggtccccgtcaattcctttgagtttcaaccttgcggtcgtactccccaggcggagtgcttaatgcgttagctgcagcactaaggggcggaaaccccctaacacttagcactcatcgtttacggcgtggactaccagggtatctaatcctgtttgatccccacgctttcgcacatcagcgtcagttacagaccagaaagtcgccttcgccactggtgttcctccatatctctgcgcatttcaccgctacacatggaattccactttcctcttctgcactcaagttttccagtttccaatgaccctccacggttgagccgtgggctttcacatcagacttaaaaaaccgcctacgcgcgctttacgcccaataattccggataacgcttgccacctacgtattaccgcggctgctggcacgtagttagccgtggctttctgattaggtaccgtcaagatgtgcacagttacttacacatatgttcttccctaataacagagttttacgatccgaagaccttcatcactcacgcggcgttgctccgtcaggctttcgcccattgcggaagattccctactgctgcctcccgtaggagtctggaccgtgtctcagttccagtgtggccgatcaccctctcaggtcggctatgcatcgttgccttggtaagccgttaccttaccaactagctaatgcagcgcggatccatctataagtgacagcaagaccgtctttcacttttgaaccatgcggttcaaaatattatccggtattagctccggtttcccgaagttatcccagtcttataggtaggttatccacgtgttactcacccgtccgccgctaacatcagagaagcaagcttctcgtccgttcgctcgacttgcatgtattaggcacgccgccagcgttcatcctgagccaggatcaaactctccataaaaattatgatgtttgattagctcataaatactaaataatgtttgtaacttatagttacgtttttggaattaacgttgacatattgtcattcagttttcaatgttcattaatgttcaatctcttttattctacttcatttatttcttgaagtcaataactttttgaacgattactttatttattctatattgtttttatagttatttcaatggtaagttttacacttttgaaattcttctttaaaaacaactgcgtcgtttttgacgactttatcatattatcaactttggaatttaaagtcaataacttttttaaaaactttttgtgttcacaacccgcttctttttcaacgcgtttattgcttaacacaagaacttattttaccagcattccaaaacaaatcaacataaaaacgtacaaaataaaagtaattttgtacgtttagcatatattatacctatttatttgtagcagctataactttttgtgcaatcgagctataaattttacctagacgatcatctgattgatatattgacggtgcaaaatcttttggattccaagatggttgctctaaaggtaattccccaagtaattgagtattaagttcatcagctaacttagtaccgccacctttgccaaagacatattctttattacccgtctctttactttcaaaataactcatgttttcaattacgccaagaatagaatgatccgtatgttttgccatcgcacctgcgcgagctgcaacaaatgctgctgtaggatgaggtgtcgttacaataatttccttacttgaaggtaacatcgtatgaacatctaaagctacatctcctgttccaggtggaagatcgagtattaaatattcaatgtctccccatttaacttctgtaaagaaattcgtcaacattttacctaacattggccctctccatataactggcgcattttcttccacaaaaaaggccattgatataactttaacgccatgacgttcaactggaattacttccttccctttaattccaggcttttcatcaatacccatcatatctggtacactaaatccatatatatcggcatctactaatccgacttttttcccttcacgagctaaggcaacggctaaatttactgcaacagtagatttaccgacaccacctttaccggaggctattgcaataaattcgactggattattttgagataataggccttctatcgttttaggtttattttcttcttttggtttaaattgatttactttttcttccggcaatgtttcaaatcgtataccgaccgttttcgcaccgttttcttttaatgcattaacaacagccatctgtaaatctaattgcggtgcaccacctaattgtgccattgctaatttaacactcacatgttctttttcttccttaatagaaacttcaacaataccttctgtttcttttaaaggcacatctataataggatctttaatttctcctaccaattctttcacttgatctaccgttaacaaagcaaatcccccttaatcattttaagacatctacatcatagcaaataacaatttttgcttagtctatcactaaaagtataaaactttttattaaataaaaaaagcagttagcctattattttaaatagaccaactactataattattttaaaatttccttctattactttctatttctttaggttctcttataaaaagtgctatcacataagctgccataacaagcacagctacaaaagcaaatgagatatccacccctatagcaatggattgctgtttaatttcagttgcagttaaatgcgatggcgatgtagataaaaatatttttgcaccaaaactcattaatgtaaccattaaagctgtgcctagtgaaccagccattacacgaccaaagttcataatagccgtgccatgtgagatttcttcatttctcaaagaattaattcctgtagtatttatcggcatcatgagtaaagaaactgaaaacattctaattgcatatacgactattaaatacgtataagatgtgtctgtatgcaagaaacacaacataattgtagtaattgttaaaattgtaaaaccagtataaatcaatggtctaggaccatacttatcataaaatttacctgtaaaaactgacataataccatttattattgcaccaggcatgataacaagtcctgataacaaggcagataaagataaactgttttgaacatatagcggtataagcagcgcaggtccaaccattgacatcattataatcattgaactaatcgtacataatgcaaatgttctatttttaaaaacccttaaatttaaaagtgcattagtaatattaaattgtctacgtataaataaatagataataaccatacttaatatcaacgcacctattactattggacttgtaaatcctaaatctcctgcactactaaatgcgtatagcattaacccgaacccaatagttgaatacattactgaacgcttatctaatttcgtatatttcacttcattgtaactcgagattgaaaccaaaccgaaaacaaaggcaagtatagcaattcctacaattataataaatggaactcgccaactcgcttgatcaataattaatcctgtaactgtaggtcctattgctggtgcaaattgaattactaaacctgctagtcccattgcaaaacctcgatgttctttactgaacaatgtaaataacgtaaattgcattaagggcataagtacgcctgcacccatcgcttgaattacacgagctaacattaaaactccaaaattcggagctaaggctgcaacaatagaacctaataaaaatgtccccatcgccgctaagtataaaggtctagttttaattctatccattagatatgccgtcagaggtatcatgacgccattaacaagcataaacccagtaactagccattgcgatgtactttcattgatatttaattctctcattatactaggtaacgctgtatttaataatgtttgatttaaaatagctacaaacgcactaatcaacataacagcaactatgaagtttcgtctccgggttgttaattcaactttagccatcataattcctcctttttaaaacagatatacacttgtccctttaatacgtatagccatgaacataatgggagtagtactcaaataataaagaagcactacataataaatcattattggttcttacacattaggcacagctaatgtgtacttaaaaactaacaatataacattgtagggcctaataatttattttatgtctcagactcatacaatggttatttaacttatttaccacaaattgagcactaagactcactattatcgattcttctattgaacaaaaagaagttggaacacatatgtgccctcaacttcagatatctattttctattatttaaatttttactttcagggtaaaattgaagcttacaaacatataagaaccctataataaccatgatgacccaaaaatcgatattgatatacacatagttcagatgaataataaaataaaataacgttgttgcaactgtgtaagaaatcaaatgaaaagtcgcgcctctaaaatatgcattttcaggcaacatttttctaaaataatccattaaatgctcgactgcaaatatgatgaagtacccaaagattatataactgccataatataataggttatcgtacatacttctattatatgtaaagtcacccaacctaaaataaataagtattctacttaatccatataaaccaaaccctagaaatgttaaaaaaatcgcaccagaaagtacaaaaataaagagaacaatcattgtagttaacaagttataaaacttatgtttaagataattcacaatcattggcctccttattaataaaatattgaacgatttatctagtatctaggaaatttattatttcttactttaattacactacatcaattttaatcataattctattcttttgattgagatgactgttctttaaaaaatacgacccataaaacaataagcccaatgctaattacagcaacagcacttaacacattgtgtaagtttggaccaaagattcctgattgtatcgcataaagatatcccattattgttgaacctattgatgccccaagatttttagttaatccataaaatgacatcattttcttcatttgtaatgggctagtttcctcttggacaatcacactatctttcgtataaatatatccaaaacttaatcctgccaaaattaacacaaatgctataagtaccggcaatttaataccaaatgaaatgataatactacttactagtagcaatgtaaatgatagtaagtaaataactttccttgatagttttgcttcaattcgatgtaaattaaaattcaatgtaatccaagctacagataaaggaaaaataaccaatccactttgcaatggagataatcctagttgttcttgaaggtagactggaatatataaattgaatcccattaaacaaatagctgttagaaggtcagttataaaaactaaagtaatcgaacgattaaattcaaccacaggtaaaaatggtgaagaaacatgtttttctactttaaataaacacattgccacaacgatagctaagataaaactcaagaaatttaaaagtaacagctgttggtttaataaagcaaacataatcaatccaataaatacataaaatagcgtgagccctttagtatcaaattttgatttagcaactgtttcttcctctggaaaatgaaatgtccatataactaatataatggcaatgatcgcaatcggtatatttatgtagaataaccaatgccatgttgcaaattctaatataccaccacctagaagtggcccaatgatactcgaaataccccaaacactgccaactatgcccataattttatatcgtaacggaatttcaaatgctaactttggaacaatttgcgataatgacatcaatacacctgatccaaaaccttgtatcacgcgtgatataattagcatagtaaaattagtacttaaaccacacataaaactacctatactaaataaaagtaatcctgcaattgccacataaataattttaaatctcgaaagtaattcgcccactataggattggcaattactaatgcgataaaatacgctgtgaaaattaatgaaattaaatttcctgcatttaaatcttgtttaattgtaggtaatgcaagcgaaataatagatgattcaatcgctgacataaacataattaatattaaagctataacagttatgattgactttaatcgcatgaaatacctccttctatatatttatttataagattttatttacaaataattggttttcatatgtataaacacttttgactttcaaatcttaacgataattctattacaatacaatcccctattagaatgatttatgtaataaaaaaagcggagtttcccccagcttttctaaacgactacataaaatataagattgcaattaaatgcaatagtgatgctattacaataaaaatatgccaaatcatatgaaaatatggtctattcttttgtgcataaaaccatgcaccaattgtataagacacaccacctaagaaaatgaataatatgaatatccatgatgtgcgaataaaaataattggtaacaagataatacctacccagcccatcactaaatagacaattaagcttaacttttggttaactttgacagctatggatttatataaaatcccccaaagtgtcgttccccataataaaataaatactgtccaacctatccaaccacctacaactgttaacaaaataggcgtatatgtaccagaaattgctacgtaaatcatactgtgatcgataatccttaaaatatatttatgaggtgtttcattttgcatagaatgataaatagtagatgaaataaacatcataaagatagaaataacataaatagacatactcacagacgcaagcgtaccatgtgcaatataactgtgcacagccgcatagggtaacactaataatgttaacaaagctgcaacaccatgagatgccgcattaccaatttcttctccaaatgataaagggatgatatccttaaatgtttctacgattgtgtcattactttttttagttgatttggacatcatagtcaccgcctatcattaaattaaacccattctacgtaaatcttctgttgcagttgcaacactatctttaccttctttatttttaagaggtgaaaattcttcttctctaggaacttgtaacgtgacaaaactagttccataagtaaatatgtcaaaatagaacaattcgaattttaaagttggttgttcaataacaccaaagttctcatctaattgcttcaaattcttaatagctaaatgataaggtaactcacgatttacagcgtttaaaataaaaccaagtttaaatgcatgaataccgatattagcattgttaaattgatttgcaacttctggatctaattctgaatactccagtactgtatctttacaatcgacattaactaaacgtccaacactttctcctggttttggttgaatcgttttagaagtaatatcgtaatcatgttctaccgtaaatcctgcaaatagtggatccaacactcttactaaaacattgtcgatattattcaagaaaatatacttaacgccattattagacatttcttctaagtatcctgccttgtctaaagatttaaacacgccaccattaccattcggcgtttccataatacgaccctgttgatttaaaattaacttcccttcttcactaagcgccacaatattatcttgtttaaagaaatggattgcttcttgatcatatccaaaataactatgtgcttcgaaataagctaaagtttcttcatgattgatatcacttgtcataatataccattgaatcgtatgtccagattgatgattcaatgtttttaattggttagcttgaagttcaaataaacttacaccttcaatttcaaacgaacctttagggcccttgtaaccaagtcttgttccttgaccacctgccatcaaaagtactgcaaattgtccttctttaatagcttgaagtccttgttcctctaaacgcttaatctcatcatcactcatttgtgatttaatatcatatttcacttcagaaactgcagatacatcatctattgttttcttattgatgtataaatcgttatataatttggcaataaaatctaaatctaatgacgctaccttctcttcaagtgcttctttttcattgttactcattattttttcatattcacacaaatgatcttgtttatatttagctaattgatttttatctagcattttatgcctcctgctgagtttgtaacctttaataatttattttctataaaaacttagtattccagttgcttattatatcattgatgaaaggctgaaataaaacataaactgttccgaccattaacgctgtagctaaagataagtctacaagtccacctgttttaaattgaatcggtgtcttcacattaaacggtaacggataaaataatttcacgccttttggtgttatcatatctagtataacatgtgacactaatccaattataattgctgccatataataattaggcgtctgaataatttgcaataaaaatgctatgattgcgataaataatattgaatgcgtaaaggttcgatgtccaaagatcaatctcacaaaaaaactaattaccttaaaccttctgccaatcttactttgagtgtgacatatatcgggtaataagctagctagagttgctagaatgataaccgtaaccgacgaaaaaatatccgtttgaaaatattgtgttgttagcgctccaacgagcatgccgcatgaagcatgtgttttacctgtcatatttgttctcctttaatactcacattttaccacatccctaacaaaaacacgaacatattttcgggttaaaattcattagtatgacacaatttaaaaaagtatcacataactcttgaaaacgattacaaaatcgtttatgatgtatttacaaaatatttaaaggatgtgtttgaataatggcaatgacagtaaaaaaggataataatgaagtgcgtattcaatggagagttgctgatatcaaaattcctacaagtgaaattaaaaatattacacaagaccaagatattcatgcagttcctaaattagacagcaaagatgtatctagaatcggctcaacgtttggtaaaacgaatcgcgttattatcgatactgaagaccacgaatacattatttatactcaaaatgatcaaaaggtttacaatgaattaactaaataaattgtataaaaaaatcattcatggtgagggcttcatgaatgattttttttaattgattcaacacccagcataaacaaatacaaaaggacaactgttcccataattttaacagttgtcctttttcacatatatttataacaaaagatgtgccatcaaagaaataattggtagtgtaatgattgttctaatcaagaaaatcataaacaatttgccgatgcttacaggaatcttcgaaccaagtatgacgccacctacttcagacaagtatattaactgcgatatactaagtgccccaataacaaaacgagttatatcattttgtacaccttcaattaatatagaaggtaaaaacatatcggcaaaaccgataataatcgtttgagaagcctgtgccgcttcaggtatttgcattaactctaaaaatggaacaaaaggtttacccaatatgacaaaaaagggcgtgtagttcgcaataatggtagcaatagtaccaatactcattactacaggcaaaataacaaaccacatatcaatgactgtttttaatcctgacttaaaaaagtcaataacgcccggtgctttaatacctacttctgttgcagtatcaaagccatgtctcaatgccgtctttccttctggcaatgcctcagtacgcgcactttcaggtacctccttagcatactcatcaggaattttatttaaaggccaaattcttggcataatgactgctgcaacgaggcaggatactatcactgataaatagaaagcaaaaaattgattttgcatgtgcactgtttcagcaactacaattgcaaaggtgatagaaactacactaaatgtcgttgaaataactgttgcctcacgacgagaataatatccttcaccatattgtctacttgtaattaagacaccaacagttccgtctccaataaatgatgctaaattatctaccgtcgaacgtcctggcaatgtaaataaaggtctcataaccggtctaaaaataggacccaacatctctaacaaaccgtattccattaatagcggtaaaaatagagctgcaaataagaatactgccactaatgttggcaataaacttgagaacaataatccacccgtttcatctgagtaaataacctttgaaccaattcgtaaaaatgtcatccatgcaaaaacaactgctaatattcgtaaaattaaccaaccaattctaacgttaaaagcattgttcattagcccgtcaggtttcaatttatcttttaaaatagttgaacaaatcagagttatgatacccgataaagtaattatcgtcacaattaaaaatggcattacgccacctaatacatctttaagcacgcctgctaaaaatgccacgggcaacgttgtttgcttctgtccatcttgttcgactggaattggtactaaaaataataagataccaattaaagacatcgtaataaacttaagtctcccaataactatctctttccttgaaaagctatccataaaatcaatccatttctctatgtattcgttttaagtatatacagaattctattcagttaacaaacatattccttatcattctatctttcaaaatgtttatgtatgcaaaataatgaataattacagttattaaatatacgctatttcttgtaatttttcaagatgaattcaaaaaaggttaagtacaattactgatttcgtacttaaccttttttaaactctaatcatatgttagttatttcattcttcgtaataatattaagaagtatggtgcaccgataattgcaatgataaccccaacaggaatatccagtggcggatgaatgccacgggctaaaccatctccaaatgttaacaatatagcaccaattaaccccgacatgataataacgtgtaatgttttatttcctattaattgtctcgcaatatgaggtgcaattaatcctaaaaagctaataccaccgacaactgaaattgcggatcctgctaatattactgctaaaattaacaatagcattttaatagttttaacttttaaaccgagtgcggttgcaacagcatcacctagattcaatacatctaattgataactcaataaaatgatgattggtatcgttattaaaaaccaaggtaatatagtataaatattcgacatatcatgtccatatagactacctgtcaaccaaacaagcgctttgtttgcttccagtggatttctgattaataagaactgcacaatcgccgtacatattgcgcctattgctaaaccaattaaggcaagctttgaacctttaacatcatattttgaaattaaaaatgataaaaataaacttactgcaaaggcacctaagaatgaacctataggtaatacaaacaatggtgctgttggaaaggtcataataataatcacagcagctaaactggcacctttagaaatacctataacatcaggtgaggctaacgggtttcttattacagcttgtataattgcacctgaaatagccaagctactaccgataataataccaagtaatgttctaggtatacgatactcatttaaaataaaatcatcttgtgtaaagattcccttaatagcatcaatcggatgaatcatgacagaccctacacataaacttatgaatatactcacaattaaaaggattgtgattaaactataacgacgtataattttcgttgtcatcatattcttttcacccctttaatcgttataaataagaagtaaagtgcacctacgaatgatgtaacaatccctactggtgattcataaggatatgtaattaaacgacttaatacatctgatagtagtaacaaatctgcacctataataaatgttaatggaatcatgactaaataattcttactcacatagcgtttgactatatgcggtacgattaagccaacaaatccaattggtcctgccactgacaccgacatacctgtaagaataatgactaatagtccaatgataattctaactttatttatattttgacccaatcccttagcaatgtcatcgcctagttccattatcgttagttgacgtccaataaaaatcgttacaattaaagcaccaataatccatggtagaatggttaaaatttcatcccacttcatactggataatgaaccgacaagccaaaacatcacttgttcgtttgaattctcattcaaaataataataccttcggtcatactactaaaaaacaaatggatggccataccagccaatgctaatttaatgggtgtcatacctttcgtagcacctgaaagtgtataaacagttaaaccacctataaatgcacctatcacacctaaatataatgcataatattctaatgctggaatgataatcgtcacaaatacaatgaaaaacgatgcaccagaactgacaccaaaaattttaggtgatgctagcggattgcgtgtcattgcttgcattaacaaaccagataccgctaatgcaccgccaataaataaccctgcaatcatccttggcatacgtacattatgcaataaaaacgttgctttcgtatctgtatgaccagtaacatagtgaatgatatcgctaaaattaattttcgaagaaccaatcgccatatttaaatatatacaaataaaaagaaagcacaaactcactatatacgtgagtgttgtgcgtctttttcttttatgatctatggcagattggctacttatttcttttatagccatttacttccaccttacttttgttctttttttgataattcaacaagttctttagccatttcttcagaagaaattaagccacgagatcttgcccaaacatcacggtcaacaatatccacgcgattatttttaactgcattcaactttttccatgttgcatcttcttgtaacttcttgaattcagcagaatcttttttagcatgatctgtcataatgatcatacgctctggatttaaatcagctaaatgttcagtgtctaattgtaagtaaggtcctttcaaatatttacttaaaccttttgttacatcgtcacttaatgcatttttaaatcctagttcgtttaaaaattgtccaacatatgaatagtttggatgtgctaataaaccagctttagcaactactgctggaagcactttttgatttctatcaaatttaatttcatctttatacttattgattaatttatcatgctcagcaagacgtttttcgccttctttttctttatttaaagctttagcaattgttttgaacgaattaatattttgtttgtagtctccatcaaaactctttaatgataatgttggtgcaattttgtttaattctttattaatacctttatgtctactgctatcagcgataattaaatccggttttaatttactaatttcttctaagtttggctgtttacgtgtacctacagaagtataatccccaattttttctctaactggtttaatgatacgttttttcttaccatcatcagcaataccaactggtttaacgtctaatgctgctaatgcatctgcaaatgagtactctaatacaacgatacgttttgcatctttaggtacttttactgtaccattttcatcttttaccgaaatagtatctttagttgatgattcttttttacttgaattatccgtattaccacaagctgcaactaaaagtaaggcaactattaatcccaatatactaaaagtttttagacctctcatcgttccactccttaatatgtataacttcatttattattttattgataacaattatcattgtcaagtagcgttcaatcttttttatatttctaaaatgtatgactatatatttcctctaataattatgactacaattagcacatttccttagacaaaatactgataatgtatcattgctatatcatctttgcattaatacaattgacaccatttagcatgaccgttatccctgtaattcagctgatattatctgttgcaattttatgtgacgaactgttgcacttaatttgataaatcaacaaatacaaaaaatctaagttgaacaattatgatacaaccgtgcaaacgatatgtagtataacttgtcaacttagacttattgataaatatattaatagtggtttaccatagcaggagatttcacatcaaaattttgaagtagcgtatcaatctttgaatcatcaatatataccttatgtaaatttttcatatacatcgaatgagaaagtgcttcataatttaatgaaaaagatatatgatctccaacttgatagtgtccttgaccatttaaatcaagcattaaatgatcactcgaagcgcctaaaatattgatatgctgatccataggtgaaatattatcgacttttgtatctaaataaccaatatctacaatagcttgtaagaatgattcatgcgtttgtgtattaactcgaggtttaatttctaaaatctcagcctccaatgtaatcgcatcttgatataacatagcgatcgcttgatttgtcgttgtatcaacacctctaaacaacgtttcacctattcgcaattcatttattttacccaaatcattatataaaagttgtggtaacatgctcgaattaccacctgaaataattttcaatcgatatcctatttctctttcaacagctgagacgaatcgattaatcataaagatatcatcatcacttggcgcatcagatttaaaacacataaaattgaatgctaaacctacaaaatggatatttttcaagtgaataatctctttaatataatctaaaacatcataagtcagaacaccttcacggccatctttccaatctaccattaataaaatcttatgtttttttcctaaaacttctgctacttcatttatttgatgtatggtagataattctgtttggatactcatatcaactttttctatcatatctgaaatctcttttttggcaggcgtacgcaataacgtatatgttaaatcctgatctgcaatactaattatgttatccaatctggattctgcaacatgattgatacctaacgcttttaagctttctacaattgtacggtcaccagctatgcacttaattactggtgtgaattgcatatttttactttgaaaaactgtttgaagtactttggcgttatatttaatcttcgatatatttatgttaacgtgtgccatgtagtactacacctctttttttatcggattatctaactcaatatttaaatattgctttactttattttccattctcatatttaacaacgctttgacagtaattgttggtccaaacaaaatatcttttaactcatttgcatgtggtagtgttgggttaatggcatgcgctactacttgctgtactatgttaaataattcggtttcttcaacacaatcatactgattaaaatgatggattaattctgccatttgattttgaataacagcatgttggaattttgcaatcactgcatctatagaatcagctattaaactatcatttgtaattttaatatctgatacacgatgttgtaatgtttctaaatcaattctagaaccacctaaatctctcactaaaaattgaatgtcaaaatgtggccccaagttcactactgtattttgcatgtgtgcttctaaagcaattccataattttgaataaaagcaattaaaggcgggattaatgcttgagcgtatcgttcaataaatgtcgtaatactttctttagtaattccttgatttaaccactctaagtaactatccacgataactttttgatctattggatttttattaactagacttgcactaactactgttgcaccttttccatcaatttcaggcttttgtcttataatacaagcaagctgacgtgccctatctttatcaacatttgcatattcaccgaacggttccatagcaactttaaatcctggatattgattcaacatgttttgtaaagcataacttaactttggtccatctacagtagtcacagttgagactgttctaacggcacttgttgcttgtgcatcgacgggcaacttaacatggtatggtttatcaattaaagacatcgtcctaaatgataaagttgcttttgaaagtattgtaaacggcgttggaattaatatttttttagcaatccatgcttcaaaatatttccctatcgtatgatcatattgccaaggatgtactaaaatcgctctatagtcttcacttttcaaacctaaactctttaaaaacacacgaatctgattgtagtattcgggaattatttcatcaataataaattgatcattaccatccatagctgtgcacacaacatggtctttttcaatcatcataatttgcaaagggatttctttttcaaactcaggtgcatatgctcgtacttcttccatagttaagggcaatttcgttttggttaaagggtgtgttggatgcccctctggtaccaaactctcagaataagttaaatcatctgtcttatcactatcttttacatgttgtaaccatgaaaaaaagttaatatcttgtggtaaccttgaaaatttaaaactttgacttattaacgtttgtctgtgagacatttgcttatatgtttcaactaaactatctcgactgtgtattaactcttcgcgtagtcgctctgaaatagggatatcaaagtcatgattcaacacatctaataaaccttctaaagttataattaatgacgtttcacctttatttaaataagtaatatcacctgtaaactcatagcgttctaatgcactttttctaacaacttcaatagtcaacacatgcatatgatactgaatttcaattaaagatcctttttgcgaaataaatgtttgctcggggtaaatacgttctttaataatggcgttaattacacgatattgaatatttctatctgcctttgcccattcaagatataccatgattactttcctccaactttaacttcaactttctatttataaaatagaataccattgtaatgcatatagtacttattcccattattgaaaaagttctaacaatgccaaacacatctgcacatatactcattaatagacttcccaatggaatcatacctctatccatcataataatactcagtactttaccacgttcataatctttaacattattttgaaaataaacgcgatttgtcgtacgtgcccattgactaaataacccaatcaatgtaatacaaatgaacatgatgacaatattgtgaaataccacacctaacaaagcaatgccaaataaaaatgaacttaaataatacatatttaccataccaatatatttaagtactttaggtaaaactagcgttgcaataataccaccaatggcacacatcgtcatagcgataccaaatatttcagatttccccggaaatactttgtttgtcaaaactggtaaaagtgtcgtatatgaaaaacctgtcgccataatcaataatgatgttataaatatttgtcgaccttccatatgtaatttgaagtaatctataataacttttaacggcatgtatcttgatgcatcttcaggtattttagttactttaaaatgtaatggtaagcataataaaactgcgataaaataacaaattgcctgtgcaagaaatgttgttggcgcatgatagactgctaatatgacaccagcaatggcaggccctattgaacgacaaatattaatgatgaatgaatgaaatgatacagcttgtgtagtagatattttatctgataaatctggtaagattgcttgtcttaaaggtgtttcaaccgcacttaaaatccctcttaatgtcgcatatataataatgacgctaattggaattgcagtgaaactatacgtgagcacacataaaattgcagttactaaaaatgatgatgaaattgtaattctcagcaatcgccctttatcatatttatcggcaattgcccctgcccacacacttagtaataatattggtacaagtctgcaaaaattgacaatccccagataaactgcgttatgataagtggtaagtacaaaccaatttagccctatttgtccaatccaattacctagaaatagtagaaaagaactgctaaaaaaatattttgtcataaaacttacacccgcattctgttgataataagaatcattatcattaatatggattatacaaatctatcttgcttttgtaaaatatttcatagaggtgaattatgaacttgaacttaatttttaaagaacagacattaaaatttaacaaagaagaacaagaaacatatttatttttacaacaacataatagcgattgggctaatatttttaaagagatgattttacaaggaagagataaagtcactcagagattggtcacatcaatgcatcgcgaaaacttagttaaagcgcgcactcaaagtaagaaaatattgagtcgtgatttgattatgttagatatctcaacgactcatatactagaaatccagttcccacaagctaagcaaacattatatgctcctatcactggagaacacgcctttgatcgaattgatgttgaaggccctttctacattaaagatgacattacaaatacgattacacgagtacaccatccaaatgaaattcttgagtgtattttaattgaagcaccagatttaaaaaatgctgctagtgatcaatttcagcaagatttaataaacagtgcaactaatatgacatttgcaattagctatcaagcactgtcaatgcaacatgattctgcacctttatttaatattatcgaaaatagcgaagatagttacttgcgttcagagcaagccgttattgaaggtcatccgctacatcctggggctaaattacgtaaaggtttaaatgcattacaaacattcctatattcttcagaattcaatcaacctattaagttgaaaatagtactgattcacagtaaattaagccgtactatgtcactgtctaaagattatgatacaactgttcatcaactatttccggacttaattaaacaattagaaaatgaatttacgccaaagtttaactttaatgattatcacattatgattgttcatccatggcaattagatgacgtattacattctgattatcaagcagaagtagataaagaattaatcattgaagcaaaacatacgttggattattatgctggtttatctttcagaacattagttcctaaatacccagctatgtcgccacacatcaaattgtcgacaaacgttcatattacaggtgagattcgtacattatcagaacaaacgacgcacaatggtccactaatgacacgtattttaaatgatattttggagaaagatgtcatatttaagtcctatgcatcaacaattattgatgaagttgctggtattcatttttataatgagcaagacgaagcagactatcaaactgaacgaagtgaacaattaggtacattatttagaaaaaatatataccaaatgattccacaagaagtcacaccattgattccttcaagcttagttgcaacctacccatttaacaatgaatcacctatcgtgacattgattaaacgttatcaatcagctgcatcattgtctgattttgaatcatcggcgaaatcgtgggttgaaacttatagtaaagcattgcttggtctcgtaatcccactagttactaaatatggcattgcattagaggctcacttgcaaaatgctattgcaacatttcggaaagatggtctattggacacgatgtatattagagactttgaaggtttaagaattgataaagcacaactaaatgaaatggtatacagtacatctcatttccatgaaaaatcaagaattcttactgattcaaaaacgtctgtgtttaacaaagccttttattctaccgttcaaaaccatttaggcgaattaattcttacaatctctaaagcatcaaatgattcaaacttagaaagacatatgtggtatatcgttcgtgatgtactagataacatttttgatcaacttgtactttcgacacacaaatctaatcaagtaaatgagaatcgcataaatgaaattaaagataccatgttcgcgccatttatagattataagtgtgttacaacaatgcgtcttgaagatgaggcacatcattatacttatattaaagttaataaccctttgtatcgagaaaataattaaggttatagaattttattaatcgtgagctcaaggattacattaacttattaaatacaatctatacaaatgagagaataatacattttccatattcaaattattaaaaatcacaaaaaacaggctgggacataaatccctaaaaaaacagcagtaagataattttcaattagaaaatatcttactgctgttctctatttatacaatacttcgtattgaatggcttcgctttcctagggtgccgtctcagcctcggtcttcgactggcactgctccctcaggagtctcgccattaatactacgtattaacatgtaattttacttttacatacttttaaaaaataagacactttgccaaacttgcacataaatgtttaattcaataatttgaattttctgtgttgggtcccttcgtataatttaataaataccactaaactaaattaatgaagtgccttatgtataaaaattataacttgatccaacttacactaccaatagaaacttctgttagaattcctcaaattgatatttcgcgatatgttaatgaaattgttgaaacgatacctgatagcgaattcgataaattcagacatcatcgtggcgcaacatcctatcatccaaaaatgatgttaaaaatcaccttatatgcatatactcaatctgtattttctggtcgtagaatagagaaattacttcatgacagtattcgaatgatgtggttagctcaaaatcaaacaccttcttataaaactattaatcgtattagagtgaatcctaatactgatgcgttaattgaatctttatttatccagtttcatagtcaatgtttaaagcaaaatcttattgatggtacaaaagtagaagctaatgccaataggtatacatttgtgtggaagaaaagtattcaaaatcacgaatcgaaattgaacgaaaattcaaaaacattatatcgtgacttagttgaagaaaaaataataccagagataaaagaagatggagatagcgatttaacaatagaagaaatagatttaattggtagtcatttagataaagaaatcgaaggtttaaatcattctattgagaacgaagatagtactcaaattagaaaacagacccgtaaaaaagaactaagattaagaagttcaaaaataaatttgatgattattccgaaagaaaaaataaatatgaagaacaaaaatcgattcttaaagatagaaatagcttttctaaaactgatcatgatgcaacttttatgagaatgaaggaagaccatatgaaaaatggccaacttaagccaggatacaatttacaaatagcgacaaattctcaatttgttttatcctatgacctatttcaaaacccaacagatactagaactttaattccatttttaacaatgattcaaaataccttcggttatttaccggagtatattgtagctgatgcaggttatggtagtgagcaaaactatatggctattatagatgattttaataaaacgccacttattacgtatggcatgtttattaaagataaaactagaaagtttaaaagtgacattttcaacacttaaaattggaaatatgacgaacttaatgatgaatttatatgtcctaataacaaaagaataggttttaaaagatatgcataccgtaatgatagatatggttttaaacgagacttcaaactatatgaatgtgatgactgttcatcatgttctttgagacatcaatgcatgaaaccaaattcgaaatccaataagaaaatcatgaagaattataattgggaatactttaaagtccaaattaatcaaaagctttctgaaccagaaacgaaaaaatctatagtcaaagaaaaattgatgtagagcctgtttttggatttatgaaggctattttgggtttcactcgaatgtcagttcgaggaataaataaagttaaacgagagctaggttttgtattaatggcacttaatataaggaaaatagcagctcaacgagctgtacattataaaatacatatcaaaaaagctgatttctatcaaataattaatagaaatcagcttttttacattgcctaagaatttaatgtcccaagccctttttatcgaataacttattgtaaaccttgtctttcttggttattgttttcgttatttttttcgtgtttttgtttccactctttttgagtcattacatcgtcaacttgcatgttaacttcaactacatctaaaccagtaatatatttaacttgttctttaactaattcagttactttacggaagatttttggtgctgattcaccatattctaagattacttttaagtctacagcagcttgtttttcaccaacttcaacagatacaccttgagtaacattgttgccacttgagaatgcattagtgaatgtatcagttaagccacctttcatatctaagatacctttaacttcacgtgcagcgataccagcaattttttcaacaacttcatcagagaatgttaatttgtttttgaattgaggctcctgattttgttcttgttgtttttgacgctcttctctttctttttcgttaacaccagtttgattgtcgtatgcttgttttgctttattgttatctacagtcataatagattctccttttacttgttaatttttatatttttttaattaaattctaaattgatgaattaactccatcgatttaaaaaattcataaaatcttgcttacggtctttcatatacccaatacctacaccaattaaacataaaacgatgataagtactgttttccaaaaacctaacgttaagaataatatcgcgattaatagaaacgctaggaaaccaacgattctccatttaaatacttttaaaaaattaatcacttgttgtgtagagtcttgtccgttttggttatgattgttagccatgatatacctcccttacaacactcgtggaccagaagttttctgatctctcacattaacttctaacttacgtactggcatttctgtgaaatattctacattctttttaatatccgaacgaattgcttcagttaaagattgaacttgaacattatttggtacgaaaaagtcagttttaatgtcgatataagatttattttttttgttatatagtttcgcaactacatttggttgtcttacttgatcatattttgcaaccgtatcgaatgccgtcttttcaacagctttacgagatacgtaaacatgaccatcatcgaagtctttgtataatccaggttttcgatgcgtaggtttgaagatactaaatactaatataagacctattaatatcaatagtgcagcaagtgaaataagtaatggttggaaccattcaaattgaaggaagtagtcttgatattcagttatacgtccatcttggatatacatgaataacaggaaccccacgattactactattaataagccaaggataaagtttttaagtcgtttcacccctaacgacacctccttagttaaagttaatttaaaaacatattaaatatgtacccatcagtttttttcttaaacataataaattaataactttaaatttatttttaatatataagatgaagtaccatttagtaatatattccctagtttttgtaaataaaacctcattattaattaattttcgtcaatatgttttgaagaacgatattctaaaatatctgggtcacgatgtttaattaaaaccttattactatttctcggtttctcctcactcaaagattttataagcgaccatatcatcgctataatgaccacggaaaatggtaacgcagcaatgattaataaattttgaattgcttgagtaccacctgtgtaaatcatgatgattgcaaataatgccataatgataccccaactcactttgacaaatgacttcggattaatatcaccacttgaactcaacatacctaaaacataagttgccgaatccgctgatgtaacaaagaaaatcataataacaagtaaagtaattaagcttaatacaaaacctagcggataatgttgtagcgtcgcaaaagttgctgtttctgtcgcagctttagcaatatcggcaatatgattatcttgtaagtaaattgctgacgcgccgaataccgcaaagaatataaagcaaactaacgccgggacaaaaagtacacctagaataaattctttaatcgtacgtccttttgacacacgtgcaataaatatacctacaaatggtgcccaagatatccaccatgcccagtaaaagattgtccaattttgtaaccattggaatttttgaccacctgtcggaatgcgtaaactcatactaaagaaatttgcaatataattacctagaccattcgtaaatgtatttaaaatgtatagcgttggcccaacaataaaaagaccaataagtactacaaaagcaagtaacatgttgatattactcaacgttttgatacctttatcgatacctgaccatgctgaccaagtaaataatatggttgcaatgacaatcaagattacttgcatcgtgaagttactcggtacattaaataaaaaatgtaaaccttcgtttatttgcaatgcaccgaaacctaatgttgcagcaacgcctgttactgtagctatgactgccaatacatcaatggcaccacctaaaggtccacgcattgccttttcacctaataaaggcgtcaatgtagcgctgactaagccaggatatcctttatgaaagctaaaatatgcaaacactagcgcgacaataccatagactgcccatgcatgaatcccccaatggaaaaatgaaaactgcattgcatcattaattgcagattgcgtgccagctttatgaataggcgttaatttgaaggcatgactgattggttctgccgttgtccagaacacaagtcctattcccataccagcactaaataacatagcaaaccaagacggcaatgagaattcaggatcttcgccttcttcacctaatgtaatgtttgcgtatctcgaaaataaaatatacacacagacaaataaaataactaaaacgagcaataaataataccaagaaaaatgtagcgcaataaatgtagtaatgttttgcgtgagtttttctaactgtttcggaaatattgctccaaaagcaacaaatatcgtacatatcactaaagatacccaaaacactagacttactgatttatttttcataaatacaaaccctttctgtgtaatggtaagttcatacccataactgcaacattttaatcatttgtaattttatatagacacaattaataatgcctcatcttttaaaaatgatatataaaacacactcaaattatttatcattgagcaacaaagtattttattgtatttaagtaatgcctttctagtgcattattgatttgatacctgcaaagttgccatatttccgtttagaatcaatagtcgctagacacaaaaaataagtcgcctatacagtattttctgcataaggcgactttacttactaatctatatattaattactaattttccaatcattgattgtttttccaacaattgatgtgcttgatataagttttcaggtgataaaccttcaaaaacttgtgtcgttgttggttggtaatgccctgattctatatttttcgtaatatcttctaaatactcatgttgtttaatcatatcaggcgttcgatgaattggacgcgcaaacataaattcatgtgtaaatgttatactttttaattttaatgcatttaaatcttgatcttcattaaaagctacgatagtcgtaatatgccctaatggttttatcagttcaatcatagtattgtaatacaagtctgtattataggtgcaaaatatataatctactaatggaatttctttaaattgacgcactaaatcctctttatgattcaatacgatatctgcgcccatcttttcacaccactctgttgtttcttgtcgtgatgctgttgtaatgacagttaaaccataccgtttagcaatttgagtggctatactgcctacaccaccggcaccattaatgattaagacagacttcccttcgttttcagcaggattcgtagaaattttaaatgtatcaaaaaacgtttcatatgccgtaataccagttagcggtagactaaccgcttcattagcacttatgttgtgtggtgcttttgcaactatagcttctgacaccaattgatatgtcgcatttgatccttgtctatttggcgatccagcataaaatacaacgtcacccggactaaataatgtaacgtctggtccgatagcttcaacagtaccaatagcatcaaacccaagtacacgaggtgcttgagtgacttccatttgtcgttgctttgtatctacaggatttacactaatgctatttactttgactaagatatcatcgttttctggcgttggctttctttgttcgtatactttaaataaatttccttcttccaatttaaagggcttctcaaatcctatcattttcatatcgtttcacctcatttatgaacttatttcttattatacaaaatagaagccatgtgtgcttatatcgcagcatcatgactcctttttcatttgaatatataaataattacagacgactttcgtattaaattttagacttatttctaccatgttgctgaacaaatttactttagataaaaaattattaaattttggtcaattaacaaagttagtttgttaaaacgtatactttattattccgttactttaataacttgtttaccaaagttatcgccagtaaataaatttttaaatgcatgtggcgcattttcaaaaccatcttcaatggttacttgtgactgaattttaccttcttgaacccatgttgcaagctgttcactagcttctttaaaagcattagcgaattcacttaccaagaagcctctcatcattacttgcttcttaataagcgtaccttgaatacgtggtccgatatcggcttcaggatgattatatgacgaaattgcgccacatactggtacacgtgcaaaacgatttaaatgcttaaatacttcatcgccaactgttccaccaacattttcaaaataaacatcaataccatctggtactgcttgtgctaacgcttctgcaaaatcctctttcttataatcaataccagcgtcaaagtccagtgtctctgttaaataatttacttttttgtcgccacccgcaatacctactacacggcaacctttaatcttagcaatttgacctacaactgaacctacagcaccagatgcagctgaaaccacaacagtatcaccggctttaggttgtccaatatcaagcagaccatgatatgctgtttgtcctggcattcctaaaacacttaaatataaatcaagtggtacatctgtcgttggaactttagtaatttgatccgcttggacatgattaatgattcgccaaggcaacatacctacaacgacatctccttttttataatctgcgagtgtcgaatcaattacttttgcaacgacatggctaacaatcggtttaccaatttcaaaaggctgtacatacgaatctgccttagtcatacgtcctctcatatatggatccactgaaatatacagcgtttgtacaagtacaccatcgctctcaagtttaggcgtgtcaatctcttcaattttgaatgtatcctcttgaggcatgccttctggtattttgttaaaaagaatttgtttattttgcatcattaatcacctttctttatttgaaacttttacttatttgttacttaagcgttaagtttgaattgtgtcttcgtgatgtctgtatgcaaatacattcttagttgttatattttgacttaagcactgattcattcatgtaacttcaaccacattatatttgctataatcataaatttaaaatgttacgacttagacattttatggaaactctcaaacaatagataatttttgaaaagctctaatattacaagcttttttgccccagaaaaactagcagttgctttattttttccataagaagtcgattaactcattagcaacattttcattctcatgaagctgactatgttgtgcaggctcaccttcatatttagattctcgataacttttcggactatttcccagtaaatattttaatgatttcgaagaactattagacactctgccgtctgaatgtgtaccatctttcaaatccccataaatatttagcacttcgatacctttacctttataaatatcttttagcacgcgtaattgctgataaggttgattcattcgacttggtttaccatctttatcaactgtaatttcattgacatcttcattcatatttaaaacaccattaaatgtccctgcaatattcacttgtttgtttaactgtggcagtgacttgtcgttaccatatgtcatcatatattgtgcaaatgttaagttccccattgagtgaccgacaaagttgaatttatcgaaattgtattcagattgtaacttagtcagtacatttttaaaccacgcagcattcttatccaaatagccttgtctgttattttcaagttcaattttcacaataggattcactgcatcttttcttagtttccctttaaatgtcactgcaccatcctttgaaacgtaagcagtgatgatatctttagttacccctcttttttctgcttgcttcaccataaacttttcagaattggcactaccaccaaatccatgtaagaacaatgttggaattggctttttaacaaattgctgttgttgtattttaaatgtttgtgcctgtcgttgactaaacaccaccataataatagagcctataataatagcgaccgctaacaatgtcgtaataattacaaaaattttcttcacacttttaactcccattcatgtcttttatataagtataaaggatgtgattaaaaatgtcctttagttgattttgaatacatcattaacttttaagatgactttggaaagttgtccgttaacgtttgttaattgattgcttctttagctttcaatggtgtgtcacccattgattaatatataaatatgtatatgcatgtttaatttatctctttctataaataaagacctaccagcactcgactgataggccttttaatatctataattatttaatttcttttgtttcggctaactctttgtaccaataagcacttttcttaggataacgttcttgagtctcaaaatcgacatagaataaaccatatcgtttttcataaccatttgaccaagagaacacatccattaatgaccaaataaagtaacctttaacatttgcaccatctataatagcatctgcaataacgttcaaatgttgtcttacataatcaatacgtgcatcatcatgaactgttttttcagattcaataaattcatctttatatcctaaaccattttcagtgatataaatcttatgatagttaggataatctttaacaacacgcatgatttgatcatataaaccttgaggatagatcatccagtcccagtctgtgcgaggtacgtcgacatcaaattcacgttgtccgacacctttaagttggtatttagaaccgcctttatcacctgtcgcattatgcgtgatttcagattctccatcgtaacctctcatccaatcactcatgtagtaattgatacctaagaagtcgtttaaatctttggctgcatctaaaatggcataatcttcatctgtaatgtttaatttaccgccattaacagataagatatgttgcacaccttccatcgtttcacgagaatacttacctaaatatgttgcatctaagatgaatttattatggatgatatcttctaattctgctgcacgaacatcttcaggatttgatggatcgaacggatattttgttggcaatgcgtgtacaacaccaatttctcctttgtatccgccatctttaaataattttactgctctagcatgagccaccatcatgttatgatgtgattggaatactttttcaaaatcatatttaatacctggagggaatttacctactaaatattgaccatcaccaataggtccaatttcattgaatgtagtccaatattttacttctgggaattctttaaaacaatattcagcataatctacaaagtagtcaatcgttttacgatttagaaaatcgccatctttgtgtaacacttctggtgtatcaaaatgatgcaatgttacaaatggttcaacatgacgtttatgacactctgcaaataacttatggtaatactcaacacctttagggttaacttcgccatatccatttgggaagatacgagaccatgcaattgaaattcggataccattaacaccgaatttttcacttaattctaaatccactggatatctgttataaaaatcactcgctggttctgcagtgtaccaatagttttcttctaaatacgtatcccatgctacgcgacctttaccatccgtatttgtcgcaccttctgcttgatatgctgctgttgctccaccaaaaataaaatcttcaggtaatgttttagtcatatgaaaaactcctattcttaattttcaaattgttgttgaacgaaatcaagggctgcttggccatctcgtgtcaatttgatatattcagcaccttgagtcttcgctaatttaatacctaatctatctgtatcttgcttaatatcttcatagttagacgcaacttgtggcgctaaaatgattaattggtactctttcataatgtccatatgtgcgccatatccgccagctgccgctttcactggcacatgatattcttcagctgctttattaagtgcattggctaataatccacttgtaccaccaccggcacaaagtactaagacatttgtttgttctgtgatatttgaagctttagctgcatcgtctgatacaccacttgccgctaaaattgaatcagcttttttcgtatcaaagtttgctgcaactttttcttttaaatctgaattactttctttacgtccttcttcttcatcaagaatttcactatcataaacttttaggaatgggtagtaaataataatatctacaacaatcaaagtaatagctagtacgaatgaccataaaccaaaacctgtacccatgataatgcccaatggacctggtgttgtccaaggtaaattcacactaaaactattcattcctaacacttcaacgaaaagtttgaaaatccatacgttaacaattggtgctaatacaaatggaataaagaacacaggattcaatactagtggtgcaccaaataaaattggttcgtttacaccaaagaatgttggtacaactgatgcacgtccaatcgctttgtttcgtttagatttcgtcatccacataaacatgaacgggacgaccaatgttgcacccgtacctccaaatgtaacgataaacatttgtgtacctgatgtaataattttatctgcgtgttctccagcttgaagcaacttgaagttcgcttcgatattcgcatatgtaatggctgcaattgctggctctacaattgacggaccatgaatacctacaaaccagaataatgcaaaggcaccaaagataattgtgacaccaatccatccatctgctgctgtaaataatggttcgaataattttaaaataccttccgctacatttgatttaaagctgttgcgaatgactaaatctaatgcataaagaatgatgattaccgctgaaaatggaattaagtccttaaatacttgtgaaatattcggcggtacttctttcggcattttaattgtaatattgcgcttcacacagaagttataaacaataacagttacaaatgctgataagaatgctgttaataaacctttagttcccataaatgcacttaagaatccaccatctttggctggatcagaagctaagaacaagaatccacacatcgctgctagcattgtagaaataaagttaatttgatttgtactttctagcttacggttaaatgaatctgttaaagatttcgctgtcgttcctgctactaaaaatgctacaagccccatcgtatagttatatggtttcattaaaatggcttccatgcctttatcccatttaaaaccaaatatatttggcacatatgcaattaatagaaagatacttgagaataagatgacaggcattgcagaaataaatccatcacggatggctcttaaatatatgttacgtgataatttctcgaaaaatggcttccctttttcaatttgtgcgatcaatttttgcgtcattgtcatcaccctcttttataaaattctaataaatgcttcattaaatctttcagtaaaattgttgtcattaaatgatcttgaccatgcatcatcgttacactgtatgcaatatcatcaccttgcgcttctttagccaacaggcttgtttgtgctctatgcgcttccgcaatgcaattgtttccttcttcaatcagtgcatctgcttttgcaaaatctccagcttgagctgctgttaatgcttctaaaaacttagaacgtgcatcccctgcaaatgcaacaatttcaaaacctaataattggacttcttctctattcatagcattaatccccttttaaacttattttctttgtttccaagatgtcgcagtatcttttaatactttatttaagtcatcaatatttttgaaaccagttgtacgtaaccattcacgagcagcatcttcaccttgttcaatgtatacttgaacagcaccagaccatgtagcacggccacaaagtaccccgttgaatttagcaccagcttcgtgagcaaattttaaagtttcttggaataattccgcagaaacaccagcacttaagtaaatgtatggtaaatgagttgctgcatcttgatctttaaagtgttgtgccgcttcctcttttgtataaaccacttcaccttcagcaaagccttctacatatttcatgtttactggtacttcaactttcaatacatcaacgttaaagcgtggttctgagaataatttcattgcttcgttaacctttctaggcttaacttttgcgaattcaacactaccgttatcaggaatgttgtcatcgtatgttaatacttctaaaaagaatggaatatcttctgcaacacattctgaaccgattctttcaatgtatgctttcttttgaatgttaatttcttcagcatcatcaacatcatagtaaagtaagaatttaacagcatttgcgccttgttcttttaaacgttttgcagaccactctactaaacagtcaggtaaacgacctttagcgtttacgtcatatccagttttttcataagcaagtaataatccacaatctttgttacgtgcatctgaagctggtaaaccatattcaggatctaataaaattgaagatgcatattgtgttaattcttccgcaactaatacttttaattgttcaatttgagctacagttggttcttcagtttgatgttttgccatcatgcgttttaaagcaccacgttggtcaaatgctaatgcagaaatgataccttcgttgttacttaattgttcaattgatgcgattttttgattcgattttgacattttttacacctctaaaacttcaatttgattgaataaatcatcataattatttaaattgacataacctgtttgtgcttcttgtgcattcagcatgcctaaagtattggctttttttagtaaatcgtggtcgttttcatgattaagaattgctgaagtaattccagcaactgtagaatcacctgaaccaaccggatttaatacacttattgtcggaatattcactctatagaatgtatgattgtgcttagcgaatgcaccttgtgcacctaaagacacaataatccactcaatcccttcgaataagggttgtgacactgcctgtttcaaactttctaaactttcatcaagtggctggttaagcaattgatatagttcagaaatgtttggtttaatgactgtaggtttgtatggattttccaaaactgtttgcaaagttgcacccgagcaatctaatatcacaggcacacctttgttttggcatcgttcaatgatttgtgcataataatcttgatttaatcctttaggtaagctacctgaaatagcaactgcttcaactttttctaataattgttcaaaatgtttaataaatcctgcagcctcttgattatcaatctccggtccctgctctaaaatttctgtttgttgcccttcatgtaaaattgcaatgcagtttcgtgtttcacccttaatgttataaaatgcatgcttgatgtcggcatgatctaattttttagcaataaattgacctaattcaccgccaataaaaccactcgcaaggactggctcacctacttgcgcaagtactcttgttacatttaaacctttaccaccagctgttttacttacttcttgaacacgattaacatcatctaatttcaatgctgttaatgggtatgaaatatcaacggatggatttaatgttaaagttaaaatcatatgtgtcgtcccttaatcgtggtattcgcctctgtcccatttttctaagaattcatcaaagaaatgtggatcagcttgatctgcattgcttgtttctaaatgtttaattttagcgattaattttttgttctcttcagttggtttatattcagcattaataaatgcatcgataatatcgcacattaataactcacctataatacgtccaccgaagccaataacgttcgcatttaattcttctttagcgtataacgctgatgtcatatcacgtactagtgctgaacgaacgccaggtactttatttacagcattgttaataccaacacctgttccacaaatacaaacacctaagtctgcattaccgctaacaacttgttcgccaacttttttaccaaaaattggataatgtgttcttgtgaaatcgtatgttcctacgtcaatgacttcatgtccttttgattttaaaaattcagatacacgcatttttgtatctgtaacaatatggtcgcatcctaatgcaatcttcatagtaatttttcctccttagcacattttattaagcatatctacgcggatttggtgtctaccaccatcgtatttaccttcaacaaaacctttaacgacatttttcgctaatgtgtctccaacaatttcagatcccatagtgatcattcttgaattgttatggcctctagtcatatatccagagcgttcatctgatacttcagcagcaatcatgcctttgatttttgtagcaaccataaagctacctgcaccaaatgcatcgataacaatacctaagttaccttcttgactttgaacatcttttgctacagccaaagttgcatcaacaaagtcaacttcctgtccttctgttacgtcaacaacatcatatttattgtctaataagtatgatttgatgacttcttttaatcgtttgccagcttcatctgaaccaataataatcgccataataagactcctttttactttaattttgaaatacctttcttaaaatgtgacatatttatttgtaggttatgaaaatcttgagaaaaggctttcaatttgattacgtttaaattataaacataaacaaacaataaatcaacataatatgtttataatatgtttgtttatgacgtattttcaaacaataagtgaacattcatattgtggtgttgttttaattaggtattcgtctgaaattgtagtaaaactttgtcgaggttcccgttgacataaatttgcataaaaaatagcccataaatgaatgcaaattcacattcacttatgagcatatagatacatattttaacaatgcagttatacttttaatttagtcgactacttcaatatatgttttaatcgtttctactttttcttcatcttcatagtccatgaccactgcagtcaattcgtttaactgacaaaatgatgtaaaatcttctttgccaactttcgtatgatcgattaacaagtatttttcaattgaattacttagtgccagttgttgcgtataggcttcatctaatgtagatgtcatcacagcacctttatttactgcgttactactaaagaacatcttgctaaatcttagtttttccaacatggcgttcgccatttcacctacaaatgcttctgtaatatggcgcatttcaccaccaattaaatagacacgaaaatgtgctgtttgtttttctaacaaaattttatacaccggcaaacaattcgtaataattgtgagcgtatgatgattgacttcttctgctaatagttccactgttgttcctggtccgaaaaacaaagtatccccatcttcaattaatgatgcagcttttttagctataaatcgtttttctgcaatttgacgggtatgtttttctttatgcgatatttctttatactgaaatgttgaattactgcgtgcaccaccatgaatcttcgttaaaatccctttattttccaattcaattaaatctcttcgaactgtcatatcagacacatttaaaccttcgacgatttcattcgttcttatcgtgccctttttattcactagtttagcaatttcgtccaaacgttcatgtttattcaatgtaaaattgcctcctttatttaggcgatgggtcattatcctttatgtttagacatcaattttaatatacatgcttattctataataaaaattgcgtaaaaactaatataatttaactgttcgattatatgtataattcatttttaaaaagaactgtttaaactgcgcttttgataatcgtaaaatgaatatactataataaaagtaaaagacgttataaatcattcattattttgatggggtgtttaacttgaaacatgatttagagacactaaaacatattatagatagttcgaatcgtattacattttttacaggtgctggtgtatctgtcgcaagtggcgttccagatttccgttcaatgggtggcttatttgatgaaatttcaaaagatgggctttcgccagaatacttgttaagccgtgattatttagaagatgatcctgaaggttttatcaatttctgccataagcgcttactatttgtcgatacgatgcccaatatcgttcatgattggattgcaaaattagaacgtaatcaacaatctttaggtgtcatcacgcaaaatatcgatggtttgcactcagacgctggaagtcaacatgttgatgaattacatggcacgttaaatcgtttttattgtaatgtatgtcataaatcttatacgaagtcagatgttattgatagaactttgaaacattgtgataattgtggtggtgccattcgaccggacatcgtattatacggtgaaatgttagatcaacctaccatcataagggcattaaataaaattgaacatgctgacacccttgttgtactaggttcatcactcgttgtacaacctgccgcaggattaatatcacattttaaaggcgacaatttaattattatcaataaagatcgaacaccttatgatagcgacgctactttggtcatacatgacgacatggtttccgttgtaaaatcattaatgacagagtaatcagtatgtaaaaagcatttcccgaatggtagggaaatgcttttaattttggagttgcgtttttggaatttggagtttggttttcggaattcgacatttggaattcagaattataatgagtggaaaattttaattattgcgtgtttaatgacttggttttgtagcgatttttatttgatgaattgtttttttgtttgatgttgggatgctacttttaatggtttgtcatttgtaagattaaaaataaacataaaataagtagaaaaataaaagctacgaatattaaaaaattagatatcttcattatcaaattccgatattaaatcattatatttttcagaatatcttgcataatcttcattattattaaaagctagccatagacctctatcatcatataaatgatatattaagtttttagtattgttaattatatatatttcagaataattatcattctgattgatatttggaactaaccctttaaagtcttgattggatatagcttttaataattttttatattttatatcttttatggaacacttatatgaaaactcctcgcacaaaatattatcatccttctcctttttatattctttaaagtaatacaattcatctattgttaacgatgtaaatttttttataacatttgttttcttataaggttcactataaacatatactacatgaaccaaatttatagaatcagaaggcgaaaacaaatcttcaaaaatgtttattgcattatcatatacagctaaaaaataagtattattgatagttttaccgtcctccaaaaactggtatttatcgccacttaaacttaaatgaattgcgttttttacctttctaaaattcaacttttttatatccaaattatttatatcaaagcacataatttacaacaccttattcccttaagatttttccttctttagttaaagaagctattctttttcctttgttatttattaacttccaataagaaccaccatgtgattgccctttatttttggaaatagtccatttagtttttgaatctctccaggtaggatttttcccttaaaccttttgagtaaattcaccaatactcatccccttatcatttaacaaacttttattaatgtttttggttatattatgagtctttactgcttttagattgtaaaaattatcgtcataaatagtggcattttccgagattcaaatggtacaaagtacattgtaatatgcataatgatacctgtaattaatgtaataatagaaaagtgtatatatctcatatcgccacctgctatacaacttattaaataattaattccaagacatattaattatctaattataaccttagttacgttattacataatataaaaatatataataacttatttgcttgctcctttcactttttaagagtaaaaaataacctgaaacatagactttaacatccaagtttcaggttagtgtaatgtaaatgatttactttgttatattatgattaaacatctaattctctgcttgtaagtgctttaatcatctctggatcagcatgtgagaaaaattggctattactttcttctaatgtcgcaatttgttgtttatcttcttctgtaagttcaaaatcaaatatatctaagttttgagccatacgttctggatttactgattttgcgagtacaacaatgtcacgttctactaaccagcgtaaaataacttgtgcaattgatttgttgtatttatctgcaatggcctgcaacaattgattttggaataattgatttttaccttctgcaaatggtgcccaagcttctaccacaacattttcttgttgaagtgctgcaacttgttcttcttgttgatggaatggattaatttctatttggttcacttgtggttgaatttgattgtgaatacctaaatctacaattcgatcaacgccgaagttagatacaccgattgctttaattttaccattttcttttaactcttctaatgcacgccatgagccatatacgtcattgtaaggttggtgaataagcactagatcaagatagtccaaatttaatcgttgtaatgatcgttcgattgatttgatagtatcttcatagttaacattttcaatccatactttagtcgtaatgaatagttcacttctatcaatacctgaagcttcaataccttgacctacttcagtttcatttaaataactttgtgctgtatcaatatgtctataacccgctttaattgcttctttaaccgcttctgctgtttgttcttgaggaatttgaaatactccgaaacctaatactggtatctttacatctttacttatttcaatatgattcataaaatgaacctcctttatcttgtatgtccactataaaccatggagcgaactctatagcaagccataggtttactttctctcccaaagacgttcaacattgtcatcataattatcactagcattgattttagcaatatgattatcataattatcaattttatattgtagtaaatctctcgcatcatgaattgtctttaagttttcatttaattcttcgagttgcttatttaaaatttgcttttgctgtgcttgaatattttcatttttaggaagctgcgctaacctgcaaaattcgataagcgattcaatactgacgcctgcatttcgcaaatttttcactaaataaatccaatttaaatcactatcattatatattctatatccattttcatctcgattaactggtggaatcacaccaaccttttcataatatcttaaagtgtcttgagatatattcatgagcgctacgacttctttagttttcattgcgactatcctttcagttatgtttggtcgtctaaagtaatgttgctttatatattgtcatcttcgtttgaatacttcttattttattactcaaatttaaatttgtctcttttttaacattttacatttcatcgtttttaattactttaaaaattgtataacttaaatatttaaaatgatataatcactaagattgataatatttaattttttgaaaattattttagttgcaatttttgggtgatgcggaaaatttgggtgatcgattgtttatatgcatcaacattctttgtggattgtttgacagtagacagtcatttgtatacgttaacgaattttgaaaaattgaatcattatttaatcataatattcattgcgcacgcgcaacacaaaaaggagacatgtcaatgacatatagaataaagaaatggcaaaaattatccaccattacgttattaatggctggtgtgattactttgaatggtggtgaattcagaagtgttgataaacatcaaatcgctgtggctgatacgaatgttcaaacgccagattatgaaaaattgaggaacacatggctggacgttaactatggttatgataagtatgatgagaataatccagatatgaagaagaagtttgatgctacagagaaagaggcgacgaatttactcaaggaaatgaaaactgaaagtggtaggaaatacttgtggtcaggagcggaaacccttgaaactaattcttctcatatgactcgtacctatcgtaatattgagaaaatcgcagaagcgatgaggaatcctaaaaccactttaaatactgacgaaaataagaagaaagtgaaagatgcccttgagtggctgcataaaaatgcatatggaaaagaaccagataaaaaagtaaaagaattaagtgagaattttactaaaacaactggcaagaataccaacttaaattggtgggattatgaaattggaacacctaaatcattaacaaatacgcttatattgctgaatgatcaattttcaaatgaagaaaagaaaaaattcactgcccctattaaaactttcgccccagatagtgacaaaatattatcttctgtaggaaaagctgaacttgctaaaggcggaaatctagtagacatttctaaggtgaaacttttagaatgtattatcgaagaagataaagatatgatgaaaaagtctatagattcatttaataaagtcttcacttacgttcaagattctgccactggtaaagaacgtaatggattttataaagatggctcttacattgatcatcaagacgttccatacactggtgcttatggcgttgtactcttagaggggatttctcaaatgatgccgatgataaaagaaacaccttttaatgataaaacccaaaatgatacaaccttaaagtcatggattgacgacggatttatgccactcatttataaaggtgaaatgatggatttatcacgaggtagagctatcagtcgtgaaaatgaaaccagtcactcagcatctgcaacagtaatgaaatcattgttgagattaagtgatgccatggatgattcaacaaaagctaagtataaaaagattgtcaaatcttcagtagagtcagattcaagttataaacaaaatgattatttaaattcatattcggacatagataaaatgaagtctttaatgacagataacagtatttctaaaaacggattaacacaacaacttaaaatatataatgacatggatcgtgtcacctatcataacaaagacttagactttgcatttggtttaagtatgacgtcgaaaaacgtagcacgctatgaaagtatcaacggagagaatttaaaaggttggcacactggtgctggaatgtcttatttatataacagcgatgtcaaacactatcatgataacttctgggtgacagccgatatgaaacgtttatcaggtacaacaactttagacaatgaaatattaaaagatacggatgataaaaagtcgagtaaaacttttgttggcggaacaaaagttgatgaccaacatgctagtatcggaatggattttgaaaatcaggacaaaactttaactgccaaaaaatcatatttcatattaaacgataaaattgtcttcttaggaactggcattaaaagtactgattcatcaaagaatccagttacaacgattgaaaatcgcaaagcgaatgggtatacgttatatacagacgataaacaaacaaccaattctgataatcaggaaaacaattcagtctttttagagtccacagataccaaaaagaacatcggttatcattttttaaacaaaccgaaaataactgtaaaaaaagaaagtcatactggtaagtggaaagaaataaataaaagtcaaaaggatacacaaaaaactgatgagtattatgaagtaactcaaaagcattctaattctgacaataaatatggatatgtgttgtatccaggcttatctaaagatgtctttaagacaaaaaaagatgaagtaactgtcgttaagcaagaagatgacttccacgttgtgaaagataatgaatcggtttgggctggtgttaattatagtaatagcactcaaacttttgacattaacaacactaaagtcgaagttaaagccaaaggtatgtttatacttaaaaagaaagatgataacacttatgaatgtagcttctataatcctgaatctacaaattccgcttcagatattgaatctaaaatttcaatgaccggttactctattacaaacaaaaatacgtcgacttctaatgaatccggcgtgcactttgaattaactaaataagcaagaaaatctcgacactataccatttttatagtgtcgagattttataagtatcgccatcattcagcttgtaatccgcagaccacatcccctttgataagttctcgattatttataaatcgaatttttaaagatgtacatgcttcaatattcttatcattcattacttgaaaatgtatatgaggttcagtagaattgccagaattcccaaccttcccaatgatatcaccatatttaacattttgcccctcattcacaatgattgaatattggtgtaaatgagctattaagctatactcattttctgcgtgcttaattacaatataatttcctaaaaactgtgattcattcgtacttccaatactgttgtcttgaaccccattcactactttttcaactgtaccatttgctggcgcaatgatatcttttccaaaacaaaaataatcagtatttacttttccttgattcttatatgttttatgattttctttaataactaaatcaatagcatacctttgatgtgggtataaatagtgataattatataattcattatctccaccccaaaaaatctcatagcaatctgttgtcggcactgcgtattttaaagtcgtttcattcttaatcgcatcataattaattaacggacgcataacaaatccgataatactattatctttccaagtcactgacactccaaattgatttgcttcatctatccatatttgctcaatagtaccatcattttgagtacacacttttaattcatgtacatcagactgccttgtataagatttgaaaagtttcctaaactgccaataactaaactctcgcttcaaattttgatcaaaaatcttatatattttcctgctcttacttttatttaaataagccccaaagtttgttttattcatatatacttaacctattatattaattttggtatcaattctttctccagttcctgcgtcatttttgcgctacctgaatcgtctacacttaattggataaatcaacatataaataattttttaaagctaaagtgtagtcgattcaccatattttctaatcatcccttaaatattaatatttgcacttaaaaagtatacatatcactcaactaatcaataatcatacttaccttcaacaaattctttaacatgcagtgttatcccttgataatatggatattttgttaatctaaatttctgctttaatgcttcatctctactattcgacatcaaatatgcatgttcaagatagcttaaatatgcttcgtcattgccgctatctccaaaacctaatattgattttactggtatattatatttcctcatcagaaattgagtagcatataattttccagcatttgacggtgtgaagtcaatatcatacgcattttcaggatcaccagctaatggattgcttcgactaaatctcgctgtatagttttggtcatttgcgtatctgacaagtgcttctaggatacgactatcattgttgtgattacctgttgaatgaaaataaaaattataatgtgtttcattaccttcaaatgctctttgtggaataaattcgacattatattgcgcagaaatatgacgtaatatatcttcaatatcttcaaataaaaatggttcgctcaagactttctttttatatgtttctgattcaacatattcgccattattccaagtgaacattttagaactcaaatcagaaaagatatgtaatggtttaaacgtcatattaacttgatccattttatccatgacactttgaaatgtacttcctgtcaatacagcagtgatcacttcattattattagttagtttttccaacaatttttccatttctcttaaatgacttaaatcttcttcatttgtattatgtttaaaatatgtttcatcaaaatcaaacaataatagacgctttgacatactcattcccccataatattttaatgaatttatctataacttaaatacactataagtctcaattaaaagtataagatcgactatatgcttttcatgattattatatacaactaatcaatccctataaactaaaaacattgcttaccacttttcaaaatgcacgagtcatatccctcgttaaaaactattactaaaaattaaaatataaaaaatgcaaaaagtatgttttaaactttatgaaacgtgttatacaaatagtgtaatatcatacaacccgaaaaggagattgagatatgaaactaaaatcatttgttactgccactttagcattgggattattatcaacggtcggagctgcattaccgagtcacgaagcatctgcagatagtaataacggctataaagaaatgactgtggatggttatcacactgttccttacacaatttcagtagatggtattactgcattacatcgaacttactttatcttcccagaaaataaaaatgttctttatcaagaaattgacagtaaagtaaaaaatgaattagcttctcaacgtggtgttacaacagaaaaaattaataatgcccaaacagcaacttatacgcttactttgaatgatggtaataaaaaagtagtgaatctaaagaaaaatgacgacgctaaaaattcaattgatccaagtacaatcaaacagatacaaattgtagttaaataataatttgaaaatagttttatagggcaagcgctgaaaaattggcgtttgtctttttagttattgaacttgtaaattattgttgtttgcttctcgtagtaacagattggcctatacaatagtaaattttatatgagtgtgtaccacaatttataatctaaacataacagcaaatctcaaatatctggaacctaataaatcccctcactactgctaatagtgaagggatttattttattacttagacgtaattataaatatatttgttctattgtagtcatggttaatcatatttacaaactatcatttctaaatcgcgcattatgaagtcaattttcataaaccgtcattatatttctggattcattattcagcttctctaatttcgtctgcaatatctttatagtcaatatttgctttagtgaaatctttatcttgaattggaaaatgctgttcaaatgtttctatattttggatttctactttaacatcttctacttcaaaatctaagacatgtccaccaaagttacgatcatcattcgcaaagtgtacatgaaatcctgctgatccgataccatggaataattctggtgtaaagaaaccaacgactgaacctttgacatacgtttcagtttgttcaggttgtcttctagctgaatcgattaaacgtgtataaggtggttcttgagccggcatcatacgtacatgcatttttttaaataagcctgaaatttttactgctgaaaataaattttcactcaacatcttttccttaatttctgcaaaaactgcttctgaagatttatctttcgtttcatagcttgtatctgctacaaatttagttacagttgcatatggtgttaactcgtcaccttttaattctacaaattctttatgttcatttgcatggtaagcttttccatctaaaaagattacctcaccgtttgaacctgttagtgtagcgatacctaagtcaccatgttgcaataattcatttattgatgcagttccttttaataatcctgccattaatgtgcctaatgtaccatgttggtataaaacattagtcataaaatctcccactcctctttaacatttatctttattttagttaaatacgtcaggtaacatatttgttgaaagtttgatattatctttgtaatttacaggtatatcaattaatactggaccatctgtttcatagccctctttaattgccgcttctaattcttcttgattagtaactcgtaaacctttcgcgccaaatgattctgcatattttacaaaatctacaggaccgaagtctacacctgacgaacgtttatatttcatttcttcttggaattcaaccatgttatattttccatcattccaaataagctggatgatatttaaatttttacgtacggccgtttctaaatcttgtgatgaaaataaaaagccaccatcgccagcaacggacacaacttgcgtattagggcgcacaagtgcagctgaaattgcccacggtaatgctacaccaagcgtttgcataccattgctaaataataaatgtcttggattgtaacttctgaaattacgtgccatccaaatatagtgacttccaacatcaactgttacagtagtatcatcagttaataccttttgcatagattcaataatttccactggatgtagaattccttcttcatgcgtcgctttaataccagtttcttcatcaatatgtgttcttaattgttctaattcgtctaaatgttgttgatttataaatggctcatccactttttcagaaatcatttcaatcgttttagcaatattaccaatcaactcttttttcggttgcatataattagtaatttcagcttgaacttcgtcaatattgataatttgtgtttctaattctttattccagttactagcttcgtattcaattggatcataaccgattgtaacaactaaatcacttttacgtaataattcatcaccaacttgattgcggaataagcccacacgaccgaagaaatgattttctaattcacgactaattacacctgcaccttggaatgtttctacaactggtaaattcgtgcgctcaactaatttgcgaatggcatttgtttcttctgcacttgaacttctcataccagctaataaaacaggaaatgatgcatttttaatcgcttcaatgacatcattaatatcttgttcactcggtactcctaaatttgttttttggcaaagtgatatagctttagattcaactggtgaagaaataacgtcttgcggaatactaataaaacttgcgccattttttcctgaagtagcaattcgaattgcatttgtcataacttctgataatgattcaggatcttgtacttcttcactatattttgatgaatattttaatagcgcagcattatcaatactttgatgcgttaatcgtaataaatcattacgtttcacttggccacctaacgctaatacaggatccccttcagatgttgcggttaataatccagtagttaaattacttacaccaggaccacttgtaacaagtactacacccggtttgcctgttaatcttccaataccttgcgccatcattgcggcgttttgttcatgacgagtgacaataagttcaggaccatcatcaattaaagcattaaatagatagtcaatctttgcacccggaataccaaaaacatattctaccccattatttttcaaagtatcaataaccatatcggctgcagtgtactttttatcagtcatttatattcatttcccttcaaatgtgatgtatagatgtgtattacatgtaattactttgtgatttgtaatctaatgatagttacgcaaaattaatgatgtttatcaaaattttacatgtacgattagatttgtaatacataaaaattgccttcagtacattatataacctttgttagatgaataaaaatcgttatttgtaatactaagtattccaaaaatgcatgaatagattttgtgcgttgtgattatgagggatgttggattgattgatgtagaggattgttacgatatttttgggatgtggtgtttagtcaatggcgggctgaaattgtcgttttatggtgggctgaaaatgctgttttatgtcgggcttgaatttgtcgttttatggagatataaaaagccacagcaagacttagatctaactgtgacttatacatttcatacttatatttatcgattggttttatagttataaatgatagaagcagttcctaaacaaattaagaagatactcattaaatatatagaaaagttatctgttttaatataaaacctaaaaagtagaaacaccagcatcgcaacaataaaataaacaggaataaaagctttcttccaaaatatagaatctttcaattaagtcactccttattttgataacactcttaaatcatggttcttgagttatcatctggttatcatccgatagctctttcccttgaatatctattattagaacactatcgtacggtctccgcaagctaaatgacaatttaataatgtacacttttgattgtgtaagcatgtacaaattatacgtgtaaatcaataattcatagttgaattaattctatacctgagacattaattcatttatactctattccatattccccacacaaacgcaaaaaaacacctcgacataacatcgaggtgttttgtatatatatcgtccgacaattaacgttttgagaattgaggtgaacgacgagctgctttaagaatttgtttttttacgttcagaaaattttagaatttcgcatgattatatagactgtcgtacaccttgatattaaaggatttcttcaattttgaatttcattgattttcatcaaattgaagcaaagggtattaacggggtattaattttttaaaaaaatctgctggtcggtggattcaataattgatcttatttactgtatttgacttctatacttttgaaaaaattttctatatcaactttatccatatttaaaatatctttattgaacacacaatgcaaatatggttttgcagaaaaaaaagtattgccttcacttatcagttgataattaacatccttaaaatttaaataaataataataccatcattttctttggctaaattctttattttcgaagaagataaagaattaaactcctcattcacatgttgtttattatattctggtttaaaaaatgtaattaatgatatctctgataaatcaatatattctttattaggtatactttgctctaaaattctttttaatcgagacacagcctctttaccatattggtttgtaatataaatattgtcaggctgtatcttgtaaaatattaagacagtctttctattttctggctgataagtcataatttcttgtaatttttcatgacctttccctattctatcaatgacatttctattaccctctgtaccaaaagattgcccaatatataaattagtaatttttaatgtagtatcatctctgtttgtaaaatattcattatattttttataccccattatgttccaaacgtcttcagagaatacttttatcaaattatcactatatttataaacttcagagtaatatactttatccaatacaacgttttttttatattgttcaaatacttttgagtacatactacaatcatcagatatttttttatcatacgaggatattaaactttctatttttttatgaattaacaatttttgaacatttaattttttaaataattcatcaatatattttttccatacttctttgaaatttatttcattttctagatatttcattaaaatttcattaaaactatctaagctctctctatattctgatgattcgatttttgtattgaattcttctttaacatagttagaagaaaaaacaatttcaaatattggtttaataaataaaatataaaaaccatactctacatcaaacttgttttcgaataaatgttttacaattttctccaattcaccacttaagtatacctcaatattgtaaccattaattttatacttcaaatcatcatctcttatatcatttaattcaaatatatctcttctgaatataatattctcatgtatatactttgaaatgtcaaatatacaatctttatttgttttcgtatttaatatagatattcttcctctatcaagtaatttcattgtatattcatctacatagttgaaggaatataaatataaaggtagcttagattttaagaaaaattcttcttccttcattttataaaagtcttccattgttattattttagtacctattaactctacatttaaaaaattactattattcatttaatttacctttatatattaattaaattttaaaattattaaactcttaacttatactacttacaaccttacatagatagtactttattaatagataacttatactaaaaaaatataaagcatataaattaatctataatatccgtattaaataattcatcttcaaaaattattgtataaatatcatttgttattattttctttaaatacctaatgttatcgatatctatttctgtctctttatatttctctaacaagttatatgcggtaactattcttttttctttttcatttagagatgatagtatttcatttaatttattttctattactttctgcttttcttcctgtgttaaatataaaaatttaatacaggaatctattctagaaaataccggttctccaatattaactattgcttcttcaatactattaaaattagatgttagaatgaaaatacaatttgaaacgtctactttataattggcatcttcaataataccttcatcaaacatttgatagaaaacattgtaatagattggtaataccttatcaaattcatcaattaaaacaacattagtttcacgatctactaaatcttttgacaatgatactttggcatgttcatctccaaagatataattaaaagattcatcattctgcatcatagaaaattgtattctagtgatattacctttatatttttttgctatttctttggctaattctgtttttccaacacctgatggaccatagtaaagcattacggtcggtttattattttctaaggaagtatgtttatataaatctatgctcatttgttttttagcgtctgtttgacctattattttagaaccagccatctgctctttataaaaatttattacatcatctttttttaatgttgtatattcatagtttatttctattatttcagaatcgtgaaaactatttagtgattgaaatactctttttggaggattctgaatatagattttcttaatatttctacctaaagtaacgatatttataaaattagtaataacatgagttgttacagaagcaaagtcgtttgaaaatatcacaagattttctatctcagtatcaaaaataccgtcaacatcatgagttccaaatgtatcacttgctcgcactatgatattgtattctctgattaattccatgaagcggtgatattctttaacttcagaattaatatattcattaaatccacaaagcggtcccgtataaacatgaatttccatttatttcactcctgcaagaataacatcatacacttgatatttatcttctttagttgcttctgatctaattcccttaaactttccaattccactaggtttggcaccttgatttagatcaaactctttatcgtaatttagattttctttgcttatttcaccaacaagtactgagtagagtgttaaattcataaattttaaatcttgtattctatagttatttttaaaagattctatattaaatctaaaaactctgttttcattccctcttgttcctattaattcaaaatagcctttaatacttctaatcgcttcattcatttttgaaacatcaaatgatagctcctcctcgtctagatgtttagatccttcaaacatacttgctatgggggtaatagtcgcgaaatatgtcatcgtatcttgttgaatatttagtttaaacccctctgaaatatcaataatagtttttttctttctaaactctactgtatccaaaaaatcatatattaatgtattctctaaaattgttttggctactcgctctccagttatatttccatttatacctgcactagccgaagcactcgctgacatcccaagtaaagaatcaaaaatttgttttacagcgctttgcttaccaaattccatgttcactttagattcaccacttgcactacctttttcatcatgcatcaactgaactgttttagtaaggttacctttcttctctatctgtaataaatccattgctgatagttcatcaaaataaattatttttttgatagtatttgtcaatatatcctctccttaatctaatacttcaaaatctggtaatttatctattaatccaagagttttcatacttacagtaataactgataaaagcagatttaaaatgtaattcggatcttcactaaattcattaggatcatctaatattccagatttcttgtcgatgcttacgttgtactgatctataatccattcaatagcaggcttgccattcacaatataattatatactttatttggaatgttagtaactgtaatatcggtattgtatattactgtatccaacacgccctttttagggtgcttcatttttcaactttataattcggattcatattattataaattatttctacaccatcccaattgagttgtttttcataatttaaatgtaattccactaactccctaccaatttcaacaaatccatatacatcctttaatatcggtattcgcggaaaacctttactcaaatcacttgaatatttgttcacataatatttatgatgcaaaattgcatatatataatatactatctcttctgaattaagatttattttctttttaaaagaattagaaatattatctacaagcctcaaactatctttacctttgtatgtagcaaagcctttgccattaccaataaattggaaattaggtaatatgtccgtgatcatagccgagaattctttattcattccctgtccttgtatataaatcacctgtccagtattctccattatattataatatctacttggcatttccataatatttttgtcgtacactatccatttttttgtaaatggtctatgcataaatttaacaattctctctggattaattgaaatattttttcctttagaaaatttttgggtaagtcctcgtgtccaactaataaatgtttcatctttgttcactaaatttatacgttctcttgaatctaagatatcaattaatctatctatttcagaattatagttatctacaagtaattttgcatttactaatgctttttcattcgaaaaatttgttacccaattatctcttgctgaatttactccattaaattgatctaaatatatagaattttcaatatccttggaatcatacattggtaaataattctcatagtttatgtctcgttgattaatccaatcattgtttttatcgggtaaaacattcaaacttttcaaattcacaattgattgatgtttcattaaagtatctaatttttgctctctagttaaatattcaccaatgtcattataatagatatcgtgattgtaacttccatctttaactaaaatagatatagctatcggtgctctacttcctgatccaaatatttttccaccttcttttcttgatttttcaccctgtgttcgttggtcgcctctcaaattaattatgtacagatagttaaattcatcgtataaaacttttctaaatccatcagtgctttgactatcaataaatgatccatttgttacaaatcctataataccttttttccaactctatcagttgcccatcgaaaagcctgtatatacgaatcatataatgatttttttaaatttgctgttgaaaaatttgcataggtatttgctatttttgcatttaatttttcatattcatttttttattatcattatttacactagattgaccagcagaatacggtgtatttccaattatgacagtaatattttctttttgttgtttttttaaccttttatcgtttagagtaaagtattcaaatcacttcacttccaaaaaaataacagaatatcaactatttattgttctccacatttcatggttcttcatcttttatggtgggaaggtaaaaattcatttatattctacacattccatattcgccgcaaaaacgcaaaaaaacacctcgacataatatcgaggtgttttgtatatatcgtccgacaattaacgttttgagaattgaggtgaacgacgagctgctttaagacctggttttttacgttctttcatacgtgggtcacgagtaagtaatccagcgcgttttaaagaacctctgtattcaggatctgcttctaataatgcacgagcgattccgtgacggatagcttgagcttgtccagtgaaaccaccaccatgaacgttaactaaaacatcatagttacctttagtttcagttacatcaaatggttggtttaagtctaaaattaatgattcgaatggtaagtattcgcgtacgtcacggttattaactgtgatgttaccttcacctggtactaaacgtacacgtgctactgagtttttacgacggcctgtgcctctatattcaacttgtgccaaagtcatttcctccttctaattaaccacgtaattcgtagttttctggttgttgtgcagcgtgtggatgttcagcgccaccatatacaaataattttttaccttgtttttcgcctaaacgagtgcttggtaacatacctttaattgagttttcaattaaacgttctgggttagttcttcttaattcaccagcagtgattgatttgataccacctgggtgatttgagtgacggtagtaaactttgtcagtttctttgttaccagtaaattcgatttttgatgcattaataacgattacataatcaccagtatcaacgtgtggtgtgtaagttactttatttttaccgcgtaagatagatgctacttctgatgataaacgacctaatgtttggccttcagcatcgataacataccatttgcgctcaatgtttgattcatttgccataaatgtttgacgcataataattgtcctcctaaaaaataaatgcttctattcaagctataaacagtttcataacctaatagatgatttcatttgtttcatttttaaaacgtttaatttcatttattttgttaactgttgttcgtttctgcttatatatcttgtaacacaataagtttccggggcttatcgtggggtggatataaaacaataccgttaataatcttataatttcacaagctttttgtcaatggcaatcagtcattttgtaatgattttttacgatgtattttgatatcgttaccaaagtcttttaataactcattttcatctaaataaattttctctaaatataatccttcagccggtgcagtgaaaggtacattcttacgattctttgattcaagaagttttggtacatcagatacttcatgtcgcccttttccaacttctattaaaaatgcaactaagacacgcaccatgttatataaaaatccagatccagtgacaatataatcaaagccatcatctgtctttacgatttcactttggtataatgttctaactttgctttctacttcagttttttgcgaacaaaatcccgtaaaatcatgtgtacctatgaattgttgcgccgctctgttcattttacctaaatccaacgtttcaggaataaatgttttcaaaccactttgaaatggatcgcggtgttgtgcttgatatactttgtagcgataacgtttacctacacaatcataacgacaatgaaaatcgtcatcgactgtaactacattgttgacataaatatcatcaggtaacgttcggttcattgcatattgccattgtgacataggtatattcagctctgtgtcgaaatgaaagtattgctgtatcgcatgtacacctctatcagtcctacttgaaggatggattctcacatgtcttttatgcatgcgttgtaatagcttttcaaattgttgctgtaccgttcgaccattttgttgaatttgaaaacctagaaaattatttccttgatacgcaatttctactaatatacgcatgaatttacactcctgaatattttaatacgaataaaataattgcaattgggataatcatggttaaagatatcgtatctctcaattgccatttaagctgtctgtagctcgttctcttaacattggcatcataacccctaacttccattgcgaccgctaattcttcggcgcgttggaaagctgagatgaatagtggcactagtaatggaataaatgatttaatacgtgttgcaatgttccctgaacttatttcagaaccacgcgacttttgcgccaaaatgattttatctaactcatccattaacgtcgggatgaatcgtaacgcaatggacattatcatacttaattgatgaactggtaatttaaacatctttagtggtgcaagtaatctttcaaacgcatctgttaaatcaattggacttgtagatagtgtcataattgttgcaatcattacaatcccaattaaacgcagtgatatatatagcccttctaaaataccattagtttcaatcgtgatgccatgccattcaactaatacatatccacctttagttaaaaatatatgcatcattaatgtgaagattaaaaagaaaaatattggtgttaaacctttgattaggaaccataattgaatttttgctaatctcataatgaataagataagtgcaaacacccaaagatatgttaatggtgaatgacagaaaaatattaatataataaaaagaaaaacaaacattaactttgctcttggatcaagatgatgaacaaaagaattaattggtaaatatcgccctataatcaatttatttttcatgttgccactccttatacaagcttacaaatgcttcttcagttaaggcaatatcttttaattttgtttgatatttttgttcaaagtcatattgtaactgaacaatttctggcaaaccaatatgccaatccgccaatttttttttatctttgaagagctcttttggtgatgtttgcgacactatactaccttctttcataacgatgacttcatctgcataacgcgcgacttcattcatatcatgtgaaattaggataattgccttattttcatctgtttgtagtgactttagtaatctcattacttgtcgtttactttgtggatcaagtcctgctgtaggttcatcaaccacgataatatcaggattcattgccaatatcgatacaatcgctattttacgcatttgtccacctgacatttgaaatggtgattgtgacattacatctcttgaaaagcctaaatccatcaacagacgatgggcatagtttttggcttcatctaaattcattttaaagtttttaggtccaaatatcatttcacgctctactgtgtcctcaaataattgagattcgggaaattgaaataccattccaattctttttcttacaggtctaatatatttatctttggtcttatgtgtaatagtaatgtcatcaactgtaactgtcccagtagtcggctttaacagcgcattaatattttgtatcaacgttgatttaccactacccgtttgtccaacgatggcgtaatatttaccttgttcaaattctgtattaacatcatgaatagcttgatgctgatatggtgtccctttttgataggtataacttacattgtcaaaccgtatagtcatagttgatccaccagcccttcataagttaagaatgatgtttggtgtcccagcatttgatttattttgattgggaatggcaaatctagacctattcttgttaactcttctgcattgtcgaaaatttcagtcgctgtgccttctttatagacagtccctttattcataacgataacatgatctgcttccatcgcctcagataaatcatgcgtaatagaaatgattgtaatattatgttctgatttaacttttctcactaaatccaataaattttgacgtgcatcaggatctaacatagaagtcgcctcatctaatataatgacagaggggttaagtgctaatacacttgctatagccacacgctgcttctgtccccccgataatgcattaggttcataatctgcacgttctaacatatcaacttgtttaagtgcttcgctgactcttctatgcatttcgtcatatggaaccgcatgattttcgagtccaaatgccacatcgtattttacaattgaaccaacaaattgattatccggattctgaaatacaattcctatgtcttttcttaacttttcaaaattatcatcagttatagcttgattattataaaaaatttctccagatttaactttctctatgccaatcattaacttggcaattgtagattttccagaaccgttatgaccaacaatagatgtccactgacctttaggtatattaaaagaaacatctttcaatgtgaaggatgcatcactttgatattgaaatgaaacatttttaaatacaataactgaattcttatcctccacttgtctctctcctttacgattcgtgtatctatcatattttacaatatttataaatcgctgtatatgacattgactgggttctctatatattactagtattttctgactcatttctagtctttaaagtgttgtttaacaactaatgataaggacttttattcctctctaacaattatgtataaacgttaataaaataaatgatttactaatataggggtggtcgcgtttgattcaacgataatactttcacttcattcagttctagtgaaattgatcaaactagcttcatcatatttttagattcgcactcaaaaaagtaaatataaagaaatcggacttaaaaacatttctgttcataagtccgatattttattcaataaaaaagcgcgcaccccatcataagtttgttgagttcacgctttaaatctttatttagttgatggggtactctgagctagacaatatttgtatgtggcaaacattatcgttgcactcatttgctttatataaaagtagttagtgtatttatataaattcttatactaattcgataattactgattcagcaccgtcaccgcgacgagggccttgtttaaggatacgagtgtaaccaccttgacgttctgtgtaacgctctgcgatttcaccaaataatttttgaagtgcagtttgtgtagtttcatcttcgtttaagatttcaacattacgtaaagttttagctgcattacgacgagaagctaaatctccttttttacctaaagtgattaatttctcaacaacactgcgaacttcttttgcacgagcttctgtagtttcaatacgttcactaataataagtgatgtagctaagtcacgtaacatagctttacgttgatcagaagtacgacctaattttctgtaacccatgagttaacctcctttatcaatcttcttttcttaatcctaatcctaaatcttctaatttgtatttaacttcttctaaagatttacgacctaaattacgcactttcatcatgtcagcttcagatttgtcagctaactcttgaacagaattgattcctgcgcgttttaagcagttatatgaacgtacagataagtctaattcttcaatagacatttctaatactttttctttttgatcttcttctttttcaatcatgatttcagcgttttgcgcttcatcagtaagaccaacgaagatattcaagtgttcagtcattatttttgctgctaatgaaactgattcttgtggtgtgattgaaccattagtccaaacatccaatgttaatttatcaaaatcactgctttgacctacacgtgtattttcaacagtatagttcacacgttcaacaggtgaatacaatgaatcaacagggattacaccaattggtaaatcactagtattattttgttctgctaatgcgtaacctctacccttgttagcaactagacgaatttttaagtgaccacctttagatactgttgcaattttaagctctgggtttaaaatttcaacatcactatcatgtgtaatgtcgcttgctgttacttcgccttcatcacgtacatcaatttctaaagttttatcttcttcagagtaaattttcaatgctaattgtttaatgttcataataattgtagaaacatcttcaactacattgtctactgctgagaattcatgtaaaactccctcaatttcaatatacttaacggctgcacctggtaatgaagatagtaggatacgacgtaaggagtttcctagtgtagtaccgtagccacgttctagtggttcaacaacgaacttaccgaatttagcatcttcactaatttcaattgtctcaattctaggtttttcgatttctatcatttaaatatcctccttatatacgtcgacttaatttaaaatgtttgctcagtgacctgtaacaataccatcataaattatacacgacgacgttttggtggacgacaaccgttatgaggtactggagtaacgtctctgatcgcagttacttctaaacctgcagattgtaatgcacgaatagctgattcacgacctggaccaggtcctttaactgttacttcaactgtttttaaaccatgctccatagctgatttagatgcagtttcagaagccatttgtgctgcaaatggtgttgattttttagatcctttgaatcctaatgcaccagctgatgaccatgataaagcattaccgaactcatcagtgatagttacaatagtgttgttgaatgttgaacggatgtgtgctacaccattttcaatattctttttcactctacgtttacgagatacttgtttacgtgccatttaaaatttgcctcctttacctattattttttcttgttagctaccgttttaactggtcctttacgagtacgcgcgttgtttttcgttttttgaccacgaactggtaaaccacgacggtgacggataccacggtatgatgaaatttccattaaacgtttgatatttaagttagtttcacgacgtaagtcaccttcgactttataaccgtctacaacttcacggatgcgacctaattcgtcatcagttaaatctttcacacgagtatcagctgatacgttagcttcttcaagaattttttgagcagttgacgtaccgataccgtatatataagttaatgagataactacgcgtttttcacgtggaatatctactcctgcaatacgtgccatattaatttacacctctcttttattaaccttgtctttgtttgtgttttggattttcacaaattaccattactttacctttacgtttaatgactttacatttttcgcaaataggttttactgatggtcttactttcatttttatacctccctatattatggagtgacgattatttataacgataagtaattcttccgcgtgttaaatcgtacggagacatctcaacagttactttgtcgccaggtagaatacgaatgtaattcattctgattttaccacttacgtgagctaaaatctcatgaccattttctaattctactttaaacattgcgttcggtaaagtatctaatacagtaccttctaattcaattacatcttgtttagccattgattaacttccccctttttgcaatagtaaggtaatcgtcaatagacaactttattgttacgaatctatcagtgattaattttataagttaaacaaaaattacgggaattaattatcgttaattgccactctcatctatctaatatgattaaatcatgcctcacttaaaatagaccgctaaaagttgatctattacaaatgatctaaaatatcaatgacatctttggtaacgtcgctaatatcttttgaaccatcaatatttttcaatacacctttttgatcatagaaatctaaaataggcttagattgtttaatattaacactcaaacgattagctaccgtttcaggattatcatcttctcgttgatacaatttaccaccatcgatatcacaaataccttcgaccttcggaggattaaatacaagatgatacgttgtaccacatgactcacagattcgacgacctgtaagacggttcattaattcttcttccggaacttcgatattgatgacagcatcaatgtttctgtcaagctcagacataatattatttaatgcctcagcttgctcgattgttcttgggaagccatctaataaaaagcctttttttgcatcgtcttcagaaattctttccttaacgatacctacagtcacttcatcaggaactaattcgccacggtccatataagacttagcttctttacctaattcagtttcttcttttatagcttttctgaacatgtcaccagttgaaatgtggggtattgggaatttcttgacaatttcacttgcttgagttcctttacctgcgccaggtaaacccatcaaaatgatattcataagtgccctcctaaaattatctaccaccaaagcctttatattctttttgagatacttgagcttctaaagatttcattgtttcaatcgctacaccaataacgataagtaaacttgtaccaccaatctgaattgattgtggtaatcccataaacttagttgctaatatcggtagaattgaaataacggctaagaagatagaacctacaaaagttaaacgatataaaactttagtaatatattttttggtttgttcaccaggtctaatacctggaacatagctaccttgtttcttaaggttatcagccattttttccggattaacttgtacaaatgcatagaagtatgtgaatagtataattagtacaatatatacaaccataccaacattacttgaaggatttgcagcattcgcaatgttttgtgcccattctttatctggatagaacaacgttaatgttctaggcagtaagaagaacgccattgcaaagattacaggaataacaccggctgagttcacttttaaaggtagataagttgcctgtgaacctaatctttgagcagtttgtttcttagcatattgaatcggaattttacgaacggcttcaagtacataaatagcacctacagttaatagtatcagtgacactaaaagtcctaatactttcaaccatgctaatgatgtatcttcttgcccaacgaacgcagtttgtccaaattgaattagactggctggcaacgttgataaaatacccgcaaatatgataatagaaataccattaccaacaccgaactgagtgatttgatcaccaagccatattaagaaagcagttcctgctgtcaaaactagtgctattaataaataactcataattgactgattgataatcagcgcacctttgagataattattaaattggaatgccatacctatagattggataaatgctaaagaaattgctaaataacgagtaacgttatttaactttcttctacctacttcaccttgttttgcccattctgagaatttagggacaatatccatttgtaataattgcattacgattgatgcagtgatgtagggtacaatacccattgcaaaaatagaaaatcgtttcaaggctccgccaccaaaagtatttaataactcagtggcaccttgagaaccttggggattatcaaaagctgcaggatttactcctggagctggtatataagtccctattttaaaaattactaacattgctagtgtgaagaaaatcttgttacgaacctcttttgttctaaagaagttcacaagggtttgaatcattagatcacctcgtgtgctccacctttagcatcaatagcttctgctgctgaagctgagaatttatgagctttcactgtcaatttcttatcaagtgaaccattacctagtattttgataccagatttttcattcttaacaacaccagattctactaataaagctggagttacttcagtaccatcttcaaatttattaagttggtctaagttaacaatagcatattctttacgatttatgttagtaaaaccacgttttggtaaacgacggaataatggtaattgaccaccttcaaatcctggtcttacaccaccgcctgaacgagctttttgacctttgtgtccgcgaccacttgttttaccgttacctgtcgcaacaccacgtccaacacgattgcgttctttacgtgaaccttctgccggttttaactcatgtaatttcatttcggcacctccttgattatttttcttctactgttactaagtgcttaactttgttgatttgcccacgaatagcagggttatcttcaacaactactgaactgttagtctttttaagacctaaagcttcaacagttttacgttgtgtttcaggacgaccaataacactacgagtgagggtaatttgtaatttagccataactagttttccctccttaattgtataattcttctactgttttgccacgtaatttcgcaacatcttcagcatttttaaggttttgtaaaccatcgattgtagcacgaaccatgttgattggtgtgtttgatcctaatgatttacttaagatatcagtgatacctgctaattcaagtacggcacgaacaggaccaccagcgataactcctgtaccaggtgcagccggtttcataaatacgcttcctgaaccgtaacggccagtaattgtgtgtggagttgtaccttcaacacgtggaacaactactaaatcttttttagctgcttcaacagcttttttgattgcttctggtacctcttgagctttaccagtaccgaaacctacacgaccatttttgtctccaactacaactaatgcagtgaaacggaaacgacgaccaccttttacaacttttgctacacggttgattgtaacaacgcgttcttcaaattctttcgtctcttcttctctacgagccatgtatttgtccctcctttaaattaaaattctaatccgctttctcttgctgcttcagctaatgctttaacacgtccgtgatataaatatcctccacggtcaaatacgatttctttaatgcctttgtcagcagcttttttagcaattgcttcaccgactttagttgctaattcaactttagttgctgtagtagcaatgtcgctgtcttttgaagaagcttgagctaatgttacgcctttattatcatcaataatttgagcgtagatatgcttgtttgaacgatatacgtttaaacgtggcttttcagctgtacctgataagttagtacgaacacgagcatgtctttttaaacgcactttatttttatcaattttactgatcatttcaatactcctttctttagagtttatctattatttaccagttttaccttctttacggcgaacgtattcaccttggtaacgaatacctttacctttgtaaggctctggaggtcttactgaacggatgttagatgctaatgctccaacttgttcttttgaaataccttcaactttaacgactgtgtttttctcaactgagaaagtaatgttttcttcagctttaatttctactgggtgagaataaccaacgttaaggattaagtctttaccttgcatttgagcacggtaacctacaccaacaagttcaagtacttttacgtatccttgagaaacaccttgtaccatattgtttaataaagcacgagttgtaccatggtttgttctatcttctttagaatcagatggtcttacaacttcaattgtgttttcttcttgtttgaatgtcattctttcatttaaagttcttgataattcacctttaggacctttaacagttacatgatttccatcaaaagttactgttacgtcactagggatgtcaataattttcttaccaacacgactcatgttatggcacctccttattttttattaccaaacgtatgcgataatttctccaccaacattacgttttcttgcttctttgtcagtgattacaccttcagaagttgatactaatgcaatacctaaaccatttaatactttaggcatttcgctagcttttgcataaacacgtaaacctggttttgaaatacgttttaatcctgtgataacacgctcatcgttttgaccatattttaagaataaacgaagtacaccttgtttatcatcttctacgtattcaacatttttaatgaaaccttcactctttaagatttcagcaatttcttttttaatatttgatgcaggtaattctaacttctcgtgacgcaccatgtttgcgtttcttacacgagtaagcatatctgcgattggatctgtcattgtcattgattgttgcctcctttcagactcttttttattaccagctagctttacgaacgccagggatttggcctttgtaagctaattcacggaaacaaatacggcataatttaaatttacgatatacagaatgtggacggccacaacgttcacaacgagtgtattcacgaactgcatatttttgttttttttgttgcttagcaaccattgaagttttagccacttaattagcctcctttaaataattatttacggaatggcataccgaagttagctaacaattcacgagcttcttcatcagtgttagcagtcgttacgataacaatatccattcctctaactttacttactttatcatagtcgatttctgggaaaattaattgttctttaacacctaaagtgtagttaccgcgtccgtcaaatgcttttttagaaacaccttggaagtcacgtacacgtggtaatgatactgaaattaatttgtctaagaattcatacattctttcaccgcgaagtgttactttcgcaccgattggcataccttcacgtaaacggaaagtcgcgattgattttttagctttagttactaatggtttttgaccagtgatcaattctaattcttcaacagcattgtctaatactttagaattttgtactgcgtcacctacacccatgttcacaacgattttatctatttttggtacttccattactgaactataattgaattttttcattaagttttcagtaacttcagtgttaaacttttcttttaaacggttcaaagtgggatcctcctttcaacttgttattaattattagatttaatttcttcgccagattttttagcgatacgaacttttttaccatcaacaaatttgtaacctacacgagttggttcgtttgttttagggtccaataattgtacattagaaacatggattgctgcctctgtttctaagattccaccttcaggatttaattgagttggtttttggtgttttttcataatgttaacaccttccacaacgacacggtcttttttaggtagagtagcaattactttaccttctttacctttgtctttacctgcgataactttaacgttgtcaccttttttgatatgcatgtgggcacctccttatttgtattggttgttattaattaaagtacttctggtgctaatgatacgattttcatgaagttaccttcacgtaattcacgagcaacaggtccgaagatacgagtaccacgtgggcctttgtcatcacggatgataacacatgcattttcatcaaatttgatgtatgaaccgtcattacgacgaacacctgacttagtacgtacgattacagctttgacaacgtcaccttttttaacaacgccacctggtgttgcatttttaacagtacatacgataacatcgccgatgtttgctgttttacgaccagatccacctaatactttgattgtaagaacttcacgagcaccagagttgtctgctactttcaagcgtgtttcttgttggatcattagttaaacctcccttatctctaaacttgtattaaataattactgactcttcaacaatctctactaaacgaaaacgttttgttgctgataaaggacgagtttcttgaattttaacaatgtctcctaatttagctgaattgttttcatcatgagttttgtattttttagagtattttactcgtttaccgtataatttgtgtgttttgtaagtttcaacaagtactgtaatagtcttgtccattttgtctgaaacaactttacctacataaactttacgatcgtttctttcgctcacttttgtaacctcctcttacttaattattgattagccttactttgttcaatttctctttcacgagcaacagtttttagacgtgcaatcgtttttcttactgtacgaatacgtgcagtttcttctaattgacctgtagctaactgaaagcgtaggttaaaaagctcttcttttgaagatttgatttgttcttcgatttctgaagtggttaagtctctaatttccttagctttcatttgtttcaccacccaattcctcacgttttacaaacttagtttttactggaagtttgtgacttgctaaacgtagtgcttcacgcgcaacttcttcagaaacgccagcaacttcgaataaaattctacctggtttaacaactgcgatccagccttcaaccgcacctttaccagcacccatacgtacttctaaaggttttttagtatatggtgtatgtgggaagattttaatccaaactttcccgccacgtttcatgtaacgtgtcattgctatacgagcagattcgatttgacgagatgtgatccaagacgttgttgtagcttgtaaaccaaactcaccaaatgttacgtagttaccgcctttagaacgaccagttgttttaggacgatgttgacgacgatattttacacgttttggtagtaacattattattttcctcctccactagtgttcttagtaggaagaacttctccacgataaatccatactttaacgcctaatttaccgtaagtagtgtcagcttcagcgtgtgcataatcgatgtcagcacgtaacgtatgaagtggaacagttccttctgaatattgttcagcacgagcgatgtcagctccgcctaaacgaccagatacttgagttttgatacctttagcaccaagtttcatagctctagtgattgcttgtttttgtacacgacggaatgaagcacggttttctaattgacgtgcgatgttttcagctactaaacgagcgtcaagatcaacttttttgatttcaattacgttgatgtgtacttttttatcagttaacgcatttaatttgttgcgtaatttttcgatttctgaaccgcctttaccaattaccataccaggtttaccagtatgaattgcaatgttgatacggtttgcagcacgttcaatctctacgtgagaaactgatgcttcttttaattcattatcaataaatttacggatttttaaatcttcgtgtaaaagtgaagcgaagtctttttcagcataccatttagcttcccaatcacggataataccaacacgaagtccgattggattaattttttgacccacagtattccctccttaaaagttaattaagcttctttagcttcttctttaccgtcacttacgacgattgtaatgtggcttgtacgtttgttaatcgcacttgcacgaccttgcgcacgtggacggaaacgttttaatgttggtccttcgttagcatatgcttctttaactactaattcatctgtgttcatgtcatagttatgttcagcattagctaaagcggacattaatactttttcaattactggtgatgaagctttgtttgttaattttaaaattgcaatagcttcagcagcatttttacctctgattaagtcaagaactagtcttactttacgaggtgcgattcttattgttctagcaaccgcttttgcttccattaggatgtcctcctctacttaatagatattatcttcttgttttcttgtcgtctgcaacgtgtcctttgaatgtacgagtaggagcaaactcacctaatttatgacctaccatatcttcagttacatatacaggtacgtgtttacgtccgtcgtatactgcaaaagtatgtccgatgaaattagggaaaattgtagaacgacgtgaccatgttttgattacttgtttcttttcgcttccttcttgagcttcaacttttttcattaaatgctcatcgacgaaaggtccttttttaatactacgagccatttgggcgcctcccttcttattatgtgcgtgcagctttaagccgcacacccaaataagttgattatattattttttcttacgtccacgaacgataagtttgtctgatgattttttaccacgacgagttttcttaccaagcgtaggtttaccccatggtgacattggagatggtctaccgataggagcacgaccttcaccaccaccgtgtgggtgatcgttagggttcattacagaaccacgaactgttggacggatacctttccatcttgaacgtccggctttaccaacgttaactaattcgtgttgtaggttaccaacttgaccgattgtagcacggcaagtagataagatcatacgaacttcaccagatcttaatctgattaatacgtatttaccttctttaccaagtacttgagcacttgcaccagctgaacgagcgatttgtccacctttaccaggtttaagctcgatgttgtgtactactgtaccaactggaatgttttgtaatggtaatgcgttaccaactttgatgtcagcttcagcaccactttcaacgatttgacctacttctaatcctttaggagcaatgatatatcgtttttcaccgtctgcatatacaactaaagcgatgtttgctgagcggtttggatcatattgaatagaatcaacttttgcattgataccatctttgttacgtttgaaatcgataacacggtattgacgtttgtgtccaccaccatggtgtcttacagtcaatttaccttggttgttacgtcccgcttttttcggtagcggttttaataatgacttttcaggtgtagttttcgtgatttctgcgaaatctaacgaagtcatattacgacgaccatttgttattggcttatactttttaatagccattgtcgcttacctccttaatggtaattgttttattagttaaataagtcgattgatccttctttaagagttacaatcgcttttcttcttttgtttgtatagccttggtaacggcccatacgttttttcttaggtttgtaattcatgatattaacacttgcaacttttacgttgaagatttcttcaactgccatttttacttgtgttttgttaacacgagtatcaacgtcgaaagtgtatttgtcttcagccattgcttcagaagatttctcagtgattacggggcgcttaagaatatctcttgcttccattatccgagcacctcctcaacttttttagcagcagcttcagtaattactaagctgtcagcattagtgatatctaaaacatttaaaccttgagcagttgtcacttgaacgccagggatgttgcgtgctgataattcaacatttacatcttcgttttcagtaactactaatacttttttaggttgttctaatgtagataatacatttttgaattctttagtttttggagcttcgaagttgaatgcgtcaactacagttaagccattctcttgagctttgaaagataatgctgagcgtaaagctaaacgacgcattttcttaggcattttgtatgcataacttcttggagttggtccgaatacgataccaccgccacgccattgtggagcacggattgtaccttgacgagcacgacctgttcctttttgcttccatggtttacgtccgccaccgcttactgctgaacgattcttaacagcatgcgtaccttgacgtaatgaagcacgttgtaaattaatagcttcgaataaaacgctattatttggctcaataccgaatactgcatcgcttaattcgattgaacctgatttagttccgtctaattttaaaacatcataattagccattatgcatttcctcctttcacttcttattatttattaccttttttaattgaagttctgatttctactaaaccttttttaggtccaggtacgttaccttttactaagataactttgttttctgtgtcaacttgaactacttctaagttttgaacagttacagtgtttccacccatacgtcctggcattttttggcctttaaatactctagaagcatctgaagccatacctacagaacctggtgctctgtggaaatgagaaccgtgtgacataggtccacgagattgtccgtggcgtttaattgcaccttggaaacctttaccttttgatacgcctgttacgtcaataacgtcgccagctacaaaagtatctactgagacttcttgacctacttcgtaagcatccacgtctacattgcggaattcacgaatgaagcgcttaggtgctgcgtcagcttttttagcgtgaccttcagctggtttattagcatatttattagattttgcatcttttttgtatgcttttttgtcttcaaatccaacttggattgcgttgtatccatcaacttctacagttttcttttgtaatacaacattttctttagcttctactactgttacagggattaattcaccgttttctccgaatacttgtgtcatcccaatttttcttcctaagattcctttggtcatcgaaagtccacctcctaaaattgtctattataatttgatttcgatgtctacaccagatggtaagtttaagcccattaaagcgtcaactgtttttggtgttgggtttacaatatcgattaaacgtttgtgtgtacgttgttcgaattgttcacgtgaatctttatacttatgcacggcacggatgattgtgtaaactgatttctcagttggtaacggaattggtccagaaacatctgcaccagaacgtttcgctgtttctacaatcttctctgctgattgatcaattacgcggtgatcataagcttttaatctgattctgattttttgttttgccataattttccctccttattcgtctacatttagtgatagacttctccacgaaaactatcttacacagcgccatggcaaagcggccgggtgtgtcagtaacctttcgcttcatcgcttttcttaaagtccaacgttagttatattacacgaaaaacatcgataaatcaaggcttttcacataatttttctatctgtctaacacatacttttatattttactttatatacttagtcagttcaactattttcgagatattttttatttccttctttattgtaaattcgtaccttgaatcattttattattatcattaaaaattattctatataattagtcataagaacggtggtgaatgaatatgaaaaatggaccaaaattatctttagcacttataggtatctttttaatactttgtgagtttttctatggcattccttttttaggtgcaacgtttattttaagttttggatggcagcctttactctttaatgcattactttatctaatttttactattatattattagtgaatagacaaaatgcgattagacctatagcgattattccaatatttggtatagtaggtagttttttagctattatccccttcttaggaattttgattcattggattttatttttcctaatgattctatttgtcctagttgtattatcagcgccaacctatatacctaataaaaatgctcgtgtcatttacacacaatacaaagatggacatagagaataattcttaaaacctttttaattaggtatataatatagaagaaacacgtccaacaattttaaaagaagtatatttatatcggatatttaaagacattcataatatcgctttatgttatttcgcttcttattttatccttacttcaaagaaaaaaacgactaccaatcattggcagtcgttttttgtgtctggatttaaccatgaacaaatatgaagtacagaatgaatagtaccattaatacatacattatcggatgtacttctttatgttttttagagataagcattgtaattggatagaaaataaatccacacgcaataccagttgcaattgaatatgataaaggcatcataatgattgtaatgaaggctggcactgcaacttcaaaacttttccagtttatctcagcaaagtttgcagccattaatacacctaccaccactaaggctggtgtcgtaactgcacttgttacaacagcgattaacggactaaagaacagcgctaataggaaacaacaacctgttacgatactagcaaatcctgttctagcacctacagcaacacctgaagttgattcgatataagaagttgttgtagttgttccaaaaactgatcctacaatcgtagctaaagaatctgagaacaatgctctaccagctcttggtaatttattatctttcataatacctgcttgagtagcaacagctactaatgtaccagctgtatcaaagaaatcaataaataagaacgttaaaataacaattaagaactgtatcgttaataattgacttgggtctttaaacgcttcaaatgcagcaccgaacgttggttcaatacttggaatcttacccacaataccagatggcatttgaatcaatccagtgaacataccaacgattgctgtgatgatcataccgataaagatagaacccggcaatttaattgcatataaaataactgtaataacgataccgaatatcgccaaaagtactggtggatcagttaaatgtcccaatgttactaatgtagattcatttttaactataatacccgaactttgtaaacctacaaatgtaatgaataatcctatacctgctgaaacagccatcttcatttgataaggaattgcattaataataacttccctaaaccctgtgacggttaatatcgcaaagaatatacctgagaataaaacgcctgttaaaccaacttgccaaggaatacccatggttaacacaacagtaaatgcaaagaatgcatttaatcccatacctggtgctaacgcaattggatatttagctattagccccatgaatagcgagcctacaaatgctgctaatgcagtcgctacaaaaatggcaccttggtccattttcatatcttctgatacgcctttaacacctgctaaacttaaaacttgcgggttaactgctaaaatataggccatagataagaaagttgtgataccgcctaagatttctcttttaaagtttgttccatatttatcgaactggaaatagtttttcacgaatggatgctcctttttttaaaataccttaatagtttaatatcattcttaataaaaaacaataccaaaagcgaacttttcgtttttctgattcaactttgttcgattttatctataaattcaagttctttaatgcatctttaaacggattattgtctaaaccttcatttttattcatatactttttcatttctttacgagatactttaccagaggatttagacttcatacgctgatccatatgtgcttgcgtttcagaatgtccacaaacacaacgatataccgcttctttccctttaccaaacaacgttaatttctttttacagtttggacatcttgcatttgttttgcgctgtacattctttttcgtcttacaagatggatcttggcacacaagcatctgaccatttttagttttaactttaatcatgaatttaccacacgttgggcattctgtggttgttaaattatcgtgtttatatttacgatcactatttttaatcccatttacaacatctttcgtaaaatctttcatttcattaataaatgttttcgcctgatatttaccacgttcaattaaaagtaatttttcttcccattgtgcagttaaaagtggcgacgttaattcttctggtgctaattctaatatttgtttaccttttgacgttactttaattttaccgtctcttgattcaatggcattcatattaaataatttatcgataatgtcggcccttgttgcaactgtgccgataccacctgtttgttttaaagtttgcgcatattttttatccttcaattgaataaagttctgagggttctccatcgcttttaataacgaaccttcattaaaatattctggaggtgttgtttcatgttctctaatatttgtttttgaaatcttcacttcatcgccttctgaaaaaggctgttgcatctctgtaatagattcaccttgtctaatagatttaaaacctaaaacagttgttacattctctttcaaaacaaatgtgtgccctgcaacctctaaagttacagttatcgcgtcatactcgtgcggaggcattaaagcttctaaaaaacgctcgacaatcatatcgtataactttaattctctattacttaagtctgacatgacaggtctcacttctgtaggaataattgcatggtgatcagatactttttgattattaaatatcgacatttttgatgaaaatgttttagacattaatgggcgtgcttggtctttatatgttgttgccatcgtcacctgaatgcgttctttcatagtatctaccatatcagttgttaaatagtttgaatctgttcttggataggttacgactttatgtctctcatataagctttgaagtgtattcaatgtttctttaggtccaattttataacgtctatacatatcttgttgtaaatctgttaaattgtacagtgattgcggatacgacttcttatgtttagtagcaacagatttaatcttaccatcgacatttttcaaattattaaccatctgttctaaagtttctttattggtatatcgctgatttgattctagctgaaaatcaaacccttttaccgttaatgataatgtaaagtattgttgtggtttgaactgattaatctcttgttgtcgtgtatttactaattgaatcgttggtgtctgaacacgtcccagggatagctgtgcatcatactttgttgttagtgcacgcgttgcattaatcccaacaatccaatctgcctcacttctcgctaacgctgcataatacaaatcgttatattgacgaccgtcttttaaatttttaaaaccttgttgaatagcttttttagtaactgagctaatccataatcgacggattggctttttgttaccaactttatccaaaatcaatcttgcaactagttcaccttctcgtccagcatctgttgcaataataatatctttcactttattatctaaaattaacgcttttactgttttaaattgtttgcttgttttaccaataacaacagttttcatatatttaggtataattggaaggtcttctaatcgccattcctttaaatttttatcgtattgttcaggtgtcgcatttgtcactagatgacctaacgcccacgtgacaatatattggttattttcaaagtaaccattacgcttctgatttatttgtaaagcatcagcaatatctcttgcgactgatggtttttcagctaatattaaagatttcataaattatcctttctcatacgttcttttatttcgaacgtgcttcatctattccactaatctttgatttaaattcaatgattgcaaatgatgtgttaaatgtattgtaacatgttaatatcactattaactttcatttcagttgaaatactatataataaaagtaacaaaaagtacggaggtaatgacatgagcatagttcagttatatgatattacacaaataaaatcgttcattgaacattcgaattatgaatcagcatcatacttatataaacttcctcaacagtacaatgaaatagatgtattaataaccgatgcgattgaatcacctggtgtattttcgattaaagaaaacgattcaatcaaagcaatcatattgtcttttgcatacgataaaaataaattcaaagtcataggccctttcgtggctgacaattatgtattatctgtcgatacgtttgaaacgctatttaaagcaatgacttcgaaccaacctgacgatgccgtctttaacttttcttttgaagaaggcattcaacaatacaaaccattaatgaaagttattcaagcaagttataacttcactgactattacatagaagcccgtacaagattagaagaagatatgcaccaaccaaatatcattccttatcacaaagggttttatcgtgctttcagcaaattacacacaactacatttaaatatcaggcacagtcaccacaagatatcattgatagtttagacgaccatcatcatttgtttttatttgttagcgaaggtttacttaaaggttatttataccttgaaattgattcacaacagtcaatcgccgagattaaatacttcagttctcatgtagattaccgtttgaaaggtatcgctttcgagttgcttgcgtatgcattgcaatatgcttttgataattttgatattagaaaagtttattttaaaattcgtaataaaaataataaactcatcgaacgatttaatggtctaggtttccatatcaactatgagtacattaaattcaaattcgaatcacgtaacgtaaaagatcaaacaatccctgaataaaacaccaagcaaataccctacagtacatcattagcatgtattgtgggtttttctactttttgtaaatattgaaaattataagtagttgttttttactattagggcagaatgctttacaataacatgcaagtgtcaattaaggggagcacttgcataaatagtataggagagtgagtagtcttgcaatttcttgatttcttaatcgcacttttacctgctttattctggggaagtgtcgttcttattaatgtgttcgtcggcggtggaccttacaaccaaattcgtggtacgacgctaggcgcactcattgttggattaggtttacttattactggtttcgcaaaattcaataatcctactgtaattattgtcggtcttatttctggtgcattatgggcgtttggacaagcgaatcagcttaaatctattagtttaatcggtgtatcaaatactatgccagtttctacaggtatgcaattagttggtacaacattattcagcgttatctttttaggtgaatggtcttcaatgactcaaattatctttggtttaatcgccatgatattattagttactggtgtagcacttacttcacttaaagctaaaaatgaacgtcaatcagataatcctgaatttaaaaaagcaatgggtattttaattgtatctacagttggatatgtaggtttcgttgtacttggtgacatctttggtgttggtggaactgatgcattgttcttccaatctgtcggtatggcaattggtggctttatcctatccatgaatcataaaacatcacttaaatcaacagcacttaatctattgccaggtgtgatttggggaattggtaacttgttcatgttctattctcaaccaaaagttggtgtagctacaagtttctcattatcacagttacttgttatcgtttcaaccttaggcggtattttcattttaggagaaagaaaagatcgtcgtcagatgacgggtatttgggcaggtattattattatcgtgatagctgctataattctaggtaatttgaaatagaaagttaaatactcatgtaacgtaaaaatgtaatcacttctgaaaataaccattcacttatagaatgattaaaattaattttcgggaattttacgttgaatgttcctctatatgtcctaggaaatacgtggctctaaaaacaaaacgcaataacacatcatgacattaatcatgcgttttaagactttaaaattagcgatacttttaaaatcttgatgatattcatatatcaagtatgcgccatacatatgaagtggatagctgcataacgcactgcattatcaacttgaatgtatgagttgaacaactatgtcataaataaaagcccccttttcacaatatacatttacatattgtggtaaagggggctctcattttctacgaatactaaaatggattttattttcaaatgtgtaaactagacaaacactgcctgatacacgtacaaaataatgatactaataatgattgtcaaattggtcgtcatacctataaatggcagtgttcgatatttaaactgaataccataagaaataattgcaacacctaccgggaacatccaagtgaccaacaatgtcgtcttaatcatatcatctgatactggtaacaacacatatactaacaatcccgcaactaatgctaatccataatgcaaacataaatatttaatagtagcaggtatatactttctttccagagtaaaattcaacatgacacctagcaaaatcattgataacggcatatttgcatgggaaagtatgctaaagaaatcgattgccacatgtggtaaatggatgtgacttatattcaatataaacattacaatgtatgtaacgagtggcactgattgtaataatttcttacctaaatatttaaaatcgaattgatcactaccttcactaaagtagctacctacaaagtaagtaattccaaacatcacaaaggcaccacctatatcagccataacaaaataaataagtcccgttttaggccatatcacttcaattagtggatatgcaaacaatccaatattcatagcaccagtcatcatacctactgatccacgcatgtgattatcatattttctaaaaaaccagacagcaatcattttcgccacaataccatatataatcattaaaattggtaaaatggagaatgacaattttaattctgcactgtttaaattcacaataactaaagatgggagtgtgacattaagaactaatgtagcaatgacttgactatctgttgcttttataaaattaatgcgcttcaaaaagtaaccaagcgcaattaataaaataatcatagtaaattgttctgtcactgttatcccttctttcaataatcttcataatttataactttaacatactccacagatattttagaagtctactgtttcatgctataatctacattaaatgcacttaattatatttcaaaggagtgttatagtatgtctttagaaaaccaactagccgaacttaaatatgattatgttcgtcttcaaggtgacatagaaaaacgggaatctttgaatttagatacttccgcacttgttcgtcaacttaaagatattgaaaatgaaattagaaacgttcgtgctcaaatgcaagattaataatctatcattcaagcaataaatgctttttgttacataaatttgactagcattgctctgaatacgttatattgatgaattgcttcatttttcgctcaattacatctagaatcacaagatgttgtcgtgttatgatttagtgtttcattaacaacatacacgcatatctatcccaacactgctatttatgttttctacgctgctgtactacatgaaccctttgaaacggagaggaagttatcatatgcaattttatctgattttactagcaatactttatctaattgttagttttattagtatttttaaaatggaagttgtatttactcgcattttgagaattattatgggtgtgttgttattattcgtcttagcattaacgacgatgagttttccaaaagagaattggtgggtatttatcgtcttattactcttagtcggtaatgtcgaagtgacaggatttaaaatgcttaaaaaagatctaaaaggcgtaaacatcttgaatttaatgtcattatttatctttgtcatatatttcatcttaaccatcgtattattctaagtaataaacaaaatatgcaataacataattgcaaccttattttattatcggattacatgttgaatgccagtattgttttattaacacatcgattaaatcgcacgtgaaataaggtctaaaatttcaaattttaaaaagccataaaagtagtcaatatcatgaccgcttttatggcttttatattatctatcgtttagtgaatcgtttttttaaagtaaagagaatttcatatattactggtacaactacaagtgttaataaagttgatgaaattaaaccaccaataactgtagcagctaatcctttcgaaataagaatcgagctatcttgaccaaataacaaaggaactaatgcaccaattgttgcaatcgccgtcattaatatcggtctaattctagtaccgcctgcttcgattaatgcttctttcatctccatgccctgttgctcattattaataacacggtctattaacacaatggcatttgttactacgattccaattaacattagcataccaattaaacttggtactgatattgtttctcctgtgattaatagtgcaataattacaccgataactgtaaatggtaaagagaataaaattgtaaatggtgctaggccacctttaaatgtaataactaggattaaatatacgataatgattgcagctaacattgcaaaggctaattgtgtcattgcattgttaatatcatctgatgcaccaccgatattaacctttacattattcggtttatccaaattatttattttagacatcacttgtcgtgttgtgccacccacatctttatttgttactttagcagataccgtcgttgcataatctccttgttcttgcgtcaatttacttggtgtcgttgttttaactaacgtagcgatatctcccaatttaatcgtaccaccagtcggctttttcaaagttatattattcaacttatcttctgaccagtctgtttgcttattttgtttgactttaacatcaacagttttaccattttctttaacagtcgtaactgttttttctggtaagttttcattcaagtgcattgcaagttgacttgcagaaataccattttctgccgctttattttgatcgactttaatttcatactgatcatatgtttgcgataaatcagatttgacattggctagtcctttaacctgtttcattttctgttcaatatcttttacagttgattttatggcatccattgatggaccttttacagtaacctctacagatttattacctgcacctgttcctaaatcttgatttttccactctccaggatgtttaaagccatctgcatgtttaataaccttatccgcttctacatcaaaattaggcgtgtcattatcatattcaaccatgattgccatactatttgtactacccgttggatctactggactactaccgccaactgagtattgaattgtttttacatgctttttctgttttaaatatttttcaacatctttcgcatgattcaacactgcttgctccgtttcaccaggcttcggtgtataagtaatagctaaaaatttatcgtcacctgctgaaataaagctagtgcctagtctcggtcctccaaatacaatagttgcaaccaaaattaatgtacttaatataattacaatccacttatgatttaatgaccaatgtaatacttttttataagttgtactaacaacacctaatccttcttgatgttgtttattacgacgtttaacgccttttttaaatagtgtagctgccaacgctggaacgagtgtaattgacactaataacgatgctaataaactaaatgcaatagccaatgcaaaaggtctaaacatttcgcctactgaacctgatacaaacacaagtggtaagaagacgataatagtaactagtgtcgatgacattattggtttaaatacttcagttgtcgcactgataattaaattttcaccttttagttgttcttctgaatctgttaagcgtcgataaatattttcaacaactacaatcgaatcgtctatcacacgtccaatcgctactgttaatgcacctaacgttagtatattcaatgaaacatcactcaatttcagagcaataagcgccataagaagtgataacggaatcgatataatagaaattgccgtcgtacgaatgtttcttaaaaacagcaaaataactataattgccacgattgtacctaatgatgctttttcaaccatcgtataaagtgatttctcaacaggctttgcagtatccattgtttttgtgacattaaaatctttattttcatcaacgaatgtatcaattttacgttgtacatctttggctacttgaactgtattggcatcttgagctttagttatttgtagattaaccgcatcctttccattcgttttagaaatagaagtacgcacatcaccaactgtaatatcagctaaatctcctagtttcgctgtcggcataccacttatattatttggtgctgacgcttttgaattttgctgtggtgatgcctgattaacgtctgacatggctgaattttgtttattgtcactttgggattgagattgcccttgtcctcctgccaacgttaatggaatatttatgtttttaaaagcatcaacagattgatattgaccatcaacaacaattgatttatctttatcaccaaattggaacaatccaagtggcgttgttcttgttgccgtttttagatagttttctacatcatcagcagtcaacccatatttttcaagttcattttgcttaaatttaagggtgatttcacggttcgtctgcccatttaattgcgcattttgcacaccatctaccgtttgcaattttggtattaattgttcattcagtactttcgttacttttttcaagtcattctctttatttgaaaatgaatatgctaaaaccggaaaagcatccatcgaattacgtcttaattctggttgaccaacttcatctttaaatttaattttatcgatttcttttttaagctgttcttctgctttatccatatctgtattattttcatattcaactgttacaattgaagcattttgtatggattgcgttttaacatttttcacatatgccaatgatcttacttgattgtcaattttactacttatttcatcttgggtactttgtggcgttgcacccggcattgttgttgtaactgaaataactggattttgtacatttggtagtaattctaatttcaatttagcactcgcatatacaccgcccaagacaactaaaacaaccattaaaaagatagcaaacttattccctaaagaaaattgtaatagcttttttatcacagtacttccccctctttcactatattcaaaaatattttactcaaccattctatattgtgtaaaaaaatctgaacgcaaatgacagtcttatgagcgttcagatttcagtcgttaatctattttcgttttaatttacgagatattttaattttagcttttgttaaacgcggtttaacttgctcaattaattggtacaatggctgattcaatacataatcaaattcaccaatcttttcacttaagtatgttccccacacttttttaaatgcccataatccataatgttctgagtctttatctggatcattatctgtaccaccgaaatcgtaagttgttgcaccatgttcacgtgcatacttcatcatcgtatactgcatatgatgatttggtaaaaaatctctaaattcattagaagacgcaccatataagtaatatgattttgagccagcaaacattaatagtgcaccagaaagataaataccttcaggatgttccttttctaaagcttctaggtctcgttttaaatcttcatttttagcaattttattttgcgcatcattaatcatattttgcgcttttttagcttgcttttcagatgttttcatcttctgctgccatttagcaatttcggcatgaagttcattcaattcttgatttactttcgctatattttcttttggatccaactttactaaaaatagttcagcatctccatcttcatgcaacgcatcataaatattttcaaagtaactaatatcacgcgttaagaagccatcgcgttccccagtgattttcattaactcagcaaatgtttttaaaccttctctatcagatcgttctactgtcgtacctcgctttaaagccaagcgcacttttgaacgatttcggcgttcaaaactatttaataactcatcatcatttttatcaattggtgtaatcatagtcatacgtggttggatgtagtcttttgataaaccttctttaaatcctttatgtttaaaaccaagcgctttcaaattttgcaaagcatctgtacctttatcaacttcaacatcaggatcgattttaattgcatacgctttctcagctttagcaatttcttttgcactgtctaacaatgcatttaacgcttctttattactataatcaacaacaaaaccacgcgaaatataacatagcgtataaggtaatttaggtacttttttaaaaagtaactgcgcaacaccctgaacttcaccgtcacgacctacagcgattcttcgcgcgtaccatccagttaatttctttgtttctgcccatttcgttaattgtaataaatctccatttgggtgggatttaacaaatgcgtcatgttcctgattagtgatatgcatcttttccatgatttatgatatctccttctatttaacaatacctttaattatacagtttgtatcttatagtgtcgattcagagcttgtgtaagatttgaactcttatttttgaaatgtccatgctccaattaatagtttagcaagttcaaatttacccattttaattgtgaatcattttatatctatgtttcgtgttaaatttaatgttatcgtacaattaatacttttcaactagttacctatacttcaatatactttcatcatctaacacgatattcatttctaaaatgaaccaacttgacttcaatgaataaatttttcctcaagcaaccacattaatgttcatatacaattacccctgttataatgtcaataatctaacaatgaggtgtttgatatgagaacaattattttaagtctatttataattatgaacatcgttgcaatcattatgacattgagtcaacctctcaccgtgaattactttagtttacgggttatacttatctttttcacatttatattatcaatctttttcattttaattaagtcatcacgattaaataatatattaacgattctttccattgtgcttgtcattattcatatgggcattctcgctcatagcacttacgtatatttatactaatggttcaaagcgataaatagcacctctgataaaaattgaatatggtgaagttgcttgtgcgtcttttatgataaccgaatgatattttgaaactttaccatcttcaattctaaaataaatatcatcattttttaaaatcaaatctgtgtaatggtcattctcttctacaatgtccatatcaaaccatttcaaccaattcgatactgtttgtgatcggtttttacttttcacaataacagtttcaattgaaaattgtttttgaaaatatttttgcaattttttagtacgcatggaatcactttcttcccattgaataaaaaatggtggcttaatttcatcatcatcctgattcattatataaagcaattgccactttaccttaccatctttatgtgtatctctttccatttgaatcggccctactacttcaacctgctcactttgtagtttatttttaactgcctctatatcatttgtacgcaaacaaatatttttaaagccttgctcatacttctcttgaacaatttgagtagcaaaagcgactccgccttctatcgtttttgccatctttttcaacttttcattattttctacatctagtagctcaatataattttcattgatataacctaatttattgaatgttccatatttatgatgatacccacctgaatgtaattttataacatctcctggaaaactaaaccgatctaactgatctatataatgaatgatgtgatcaaatttcaatatcattagtatccccctatttacatgtaattacgcttattttaacaaagtataattatttttgctcttaataattatatattgatttctaattgctcccgttttataattactattgttgtaaaaaggttagctaagctaactattttgtcttaggagatgtcactatgctatcacaagaatttttcaatagttttataacaatatatcgcccctatttaaaattagccgagccgattttagaaaaacacaatatatattatggccaatggttaatcttacgcgatatcgctaaacatcagcccactactctcattgaaatttcacatagacgtgcaattgaaaagcctactgcaagaaaaactttaaaagctctaatagaaaatgaccttataacagtagaaaacagtttagaggataaacgacaaaagtttttaactttaacacctaaagggcatgaattatatgagattgtttgtcttgatgtacaaaagctccaacaagcagtagttgccaaaacaaacatttcgcaagatcaaatgcaagaaaccataaatgtgatgaatcaaattcatgaaatattattaaaggaggcacacaatgactaatcaaggctcattaaataaatcacctattttcaccaaaagttttacaattaactttttagtcaactttatcgtatacctatgcatgtatttgttacttgtagttattgctggctatagtaagcaagctttcgacgcttccgattcattagccggattagttgtaggactatttattgtcgggtctttaattggtcgatttgctacaggtaaatttgtaaatcaaatcggacctaaacgattattatttattggtttaattgctttaattatcacgcaattactttattttattgatggatctttagcttttttaatctttgtacgtctcataaacggtatcgcaactgcagttgtgacaactgcaacaggtactattgcggcatacgttacccctgttaatagaaaaagtgaaggcatcagtttattttccttaagtttagtattaggtacagcgattggcccatttctaggcatgttacttattacaaaatacgcaattgacttactgtttattatttgtgtcatattaggcatactcggactcattatctcattatttataaaagttgatttcgaagtaacaaataacaaaactgaaactaatgtcattgataaaccaagatttagtattcatcaatttattgcaaaagaggccattcctgttgctgtaattatgcttttaattggcgttacctatgcgtccatcctaacttatttacaagcatttgctttagagcgacacctagtcactgcagcaagctatttctttatttgctatgctatagcatcgttaattactagacctattgctggtagattgatggatgataaaaatgaaaatattattgtctacccagcatttatcatgcttttcctttcatttgtatgcttaatttcaagctatcaaagctggttaatattacttgctggtgcttgcctaggtttagggtatggaaatttatcatctgcaatgcaatctattgcgataaaagtctcacccccgattaaatatggtatcgcgacatctactttttacgttggtctagatgcaggtgtcggcttcggtccatcattccttgggttatttactcatatgttttcatatagtgaaatcttcggctttatggccgctttagcaatcattactatgcttgtttacttcttaattcatggacgtcatgtaactagaaatgccatgaactaaatatttatattcaaaaataaaaagcatgccaatctctattcatcatttgtctgtccccaagacgcaattatgatgaatagagattggcatgctttttaagtttttagtttgtaacgcttaacacttctatttctttagtaattttatctaacaatttcttttgagaagtactatagaaatagaatacttgtctttcatccgtttcagaacgcaatttagaaataagctcttttttatagattttacggataatcacatcgattttacttgtatcccatagcatttcaaaatgtaatgtatccctcaattctttaccgctaatcttttcagcttcatacactttaaaaaggactacaaattcttcaattgaaatcttatgtgttgtttttaaccagtgctttaactgacttaactccctttctgcttctataaaacgttgaactttattactcataatatgatgcctcctatgtttcttcttagatgtttgtaattcatattattatacaattacttaaatttattatatatcaaacttagcattttatctattacaaatattaaattgctggctatatcttgtttagatttatatcttttggacaacttgttgtttattcgacaacatttatacctaaaaaagatatattacaactcaatggcatggagtgtgacatcaatgttaaagaaccactaaagatttattatgtagtgattcttaagagtgggatagaaatgatattctcataaaatttatttcgttgatccccaacttgcattgtctgtagaatttcttttgaaattctctatgttggggccccgccaacttgcacattattgtatgctgacttttcgtcaccttctgtgttggggccccgttccccaacttgcattgtctgtagaatttctttttgaaattctctatgttggggccccgccaacttgcacattattgtaagctgactttctgtcagcttctgtgttggggccccgccaacttgtaaaaactttaaaaacgatcatttctattaaatctggcatagatatgaccgtttttactttaataaataatattgtattttagggagtaagacagaaatattaaaacatctctaatgatttaatatgtagtggtccctacacattaaccaccaatataattcatgtttatctttttacgttgacgattggcaactgtttgagcagttctctcatctgaatatcgatcatctcttatttgccataaagctttaaattgttcttttaattcttcgtcggtcacgccagaacgaataaacgctttaacgttaaatccatcgacagttgcaaataaacatccgtaaaacttcccatctgatgacagccttgcgcgtgtacatgtagaacaaaatgattgtgaaacacttgtaatcaaaccaaattgaacaccattatccttatggcgataatattttgctacttccccaaaatattttggttctacaggatcgatttcaaagtgctgctctatcattgtaagcatttcatctttagttacaactttactgaaatcccatccattatcattaccaacatccataaattctataaatcgaatctctatatgtttatctttaaaatattcaagcattggtatgatttgatcatcgttaatacctttttgtataacaacatttacttttacattcaaaccaatagacgtcgcgtaatcaatttgttctaaaatcgtagtcgctttaatattacgattattgattgattgaaatagcgtatcatcaatagcatccaaactgacattaattctgcgcagcccagcatcatataacttttgtccatgcttttttaataacaaaccatttgtagtcaaaccaatatcttcaataccatcgatttgatttaatttagctataagtacatctaaatcccgtcgcatcaatggttctccacctgtaatgcgtattttttttacacctaattctgcatataccttagcgattctagccatttcatcaaacgttaaaagttcatttttaggtaaaaatacgaaatcatctccaaatacctctttaggcatgcaataatcacacctaaagttacaccgatctgtcacagataaccgtaagtcacggatgggacgtcctagtttatcttttatttgttctaccatttgtggacctcctaacagcttacaatttttgaattaaagcgtccaaatcatgctgataatttatatttttgtaccaatatgagggcgcatctacatcccttacatccaaataatccgttgataattcatgatatacatttttaaaactgtaattatcagaatgtagtgctttagttatagcgcctaatgcattcggactataaaatgcaattgttggaataaaacgtccatcttctttaaaagctgcgacatctaaatgattttcaataagatgagaaactaaaaactgatacaacgtgcttacagctttaccagtaatcattggtgtatcaacagaaacgacaaaaaacaattcttcttcaggatgttgcttcatgattgtataaattcctgctaatggacctttatcattatgattctcatcatctataacaacatttggatatttaaattgcgttgccaattgcgcatttgtactaataataatttcattgaacatatttgttgattctaatgtcttaattactctactataaaaggtctcaccgttcacttccgcaaaagctttgggcttaccaaatcgcactgaatgaccacctgcaagaattattgctttcatgctcccttaacctccactaaccggtggaattaatgcaacagtatcattaggttgaatgaaatccgatttttgtacaaattcctcatttacagcaacttgaaactttttattattgatttgcggataacgttcaaacaataaatcttcaaattgttgtacagtcaatgcttgttcaagcacaatatcttcctgtgctttttgtaatatatctttaatttctgcgaagtaaagtaccttcatctctcttattcctccctctttgcttcttcataattccctttttgatgcccttgccattttgaaccatcttcccaaatttcttttttccaaatcggaacaatttcttttatacgctcaattgcatattcatttgctcgataggcatctttacgatgcggtgaagaaaccgcaattaatacagcgatatctgaaatttgtaatggccctattctatgaacaatactcgttatcgttccaggccatttttcatttatttcatctccaatttgtgccaatttcttttcagccattggaatatacgcttcatattctaaatattccgttttgacgcctttagtccattcgcgaacatgaccggtaaaaacaactactgcaccttgatattcatttatagtgaattcacgatattgttctgtttgtatcggttctgtcacgatttcaaattgtttcattcatttcaatcctctatgttaattgtgtatcacaatcatttttaattttatttaataaccattgctcaaatgctgtaaaatcttcatgctcccttacattaatgctataacaaacattcgacaattgttgtaatacttgcaactcttcttcatttcgatagactacgactttttcaaaatcagcatttttaaagccttcaactaatacgatattggtgtcaattgtaacagatttttcaataatttgagtaagattttgattatctacacgtgttacagtttgctgatattgaaaaccttgtacaatactttgatctgcccccgcttcaaaatgcttcatgtgatcgacgtctgaatcctgtaattgaatatcttccttaccatgcccatgatgtttaatagtagcaactgtataaccatgtgactttaagaaagagacaatatgcctcatcaatgttgtcttaccagactttttgtaacctacaatttgtaaaatcataaaagaagttcctcttcagcagcgtcagattcagtcaatataatatctactgtatgccccgctttaaaaccacgtgaccctcctggtaacatgaccatacagttagcatgtgcaatcgctacaaccgcacctgatttattgaatcctgaaggtactacagtagctccagcacttgttaacgttgctttagcacgtataaatcgtgtgaatgggtttgccttggtaaaatcttccattaatgttgctttaattatttgcgggaagacttctagtgcgccacacatatgtttaacagctggtttcacaaatagttcaaatcctgtaaaacaagctgatggatttccagataatccaaacaaatactttccatctacaaatgcaaccgttgttacgctaccaggacgcattgctactttattaaataacacttccgcctttacagccttataaatctcaggtaaatagtcaaaatctccaacagaaactccgcccgttgtaataacgatatcatgtttttccatagcttctttaacgacttggatgccactatctaaatcatctttttgtgttttgtaaataccaacttcaagacctaatttttctgctaaggcacgaatcattgggccattagagttacgaattttcccatcttctaatacatcattaacatctaataattcgcttcctgttgcaataacagcgacactcggttgcttaataactttaacctctgcatagccatatgttgcaaggaccgcgatagcccctggattaattacttgtcctttttttagaacaacatcgcctgtctttgtttcttcaccttttaaagatatattttcattttttgaaaatggtttacgaattgtaaatgtatcttctagttcaatcgtttgttcaaacataacaacagcatctgcgccattaggtatttgtgctccagtcataatacgcaccgcttcgtgatccccaactaatttatcagaaactgaacctgcaccaatatgatcaatcactttaaactcaatgcgattctgaccacttgccccttgtgaatcaacactgcgaattgcaaaaccatcataaggtgatttatcaaaccttggtatatcataagtagctacaatatcttctgctaagatatgatttagacttttttcaagtgctaccgtaattgccggcattgaactctgctgattaacgatacgttgaattgcttctttaactgggattgggtttcttttttctactaccattaaaaatcatctccaaaacttttattttttcatgatatactagatgcactaggaggggtaaaatgactgagtttactcatattaatcaacaaggccacgccaaaatggtcgatgtatcagacaaacaaattacaaaaagaactgctgtcgctcattcaagcattactgtaaatgaaactatttttaagcagatttctaataacaccaataccaaaggcaatgtattgaacactgctcaaatcgctggtattatggctgccaaaaatacatcaacacttattccgatgtgccatccattaccattgactggcatagatgttcacttcagctgggatgaaacaaatgcacccctttatactttaaacattcaaacaactgtctctacaactggcaaaaccggtgttgaaatggaagctttaaccgctgcatcagcaacggctttaaccatttacgacatgacgaaagcagttgataaaggtatgattattggcgaaacctaccttgaaagcaagtctggcggtaaatctggagattttcaacgccaatcaaatcaataaattattttgtaagctcatgaatcagatgatttaattctggtttaatgagcttttctaatgctaatttaactgcgcctgttgatcctggaatcgaaaatatcaatttattattaactgtacctgctacagcacgagacaataatgcacgcgtgccaacatcttcaacataactcaaatatctaaacaattccccaaagccttctatctctttagttaaaagtggttttactgcttcaatcgtcacatcacgttgtgcaatacctgttccaccagtcgtaatgatgacatcaatatcttcttctaaccacttcttcacctgcgtcgtgatggctactttttcatctttcacaattgtataatgtgcgtcactcacttcaacgtcatctgcttgtaatagttggcgcacgcattgaccacctttatctgtatcaaagtctctagtatctgataccgttagtacggctgctttaactgtacgattcaatttaacgttttgatgttcgcccataatattacactccttttgtcttatctttttttatccaaacaataaattcattagatgtgtggcatctgatgtgcgtgtcatgccatgtattaaaaaccttccacctttaaaagcaacaatgcggtgtcctttaaattcaaacataaccatatacgaattactgcgataatttaactgatgttgttttaaaaattgaacaagaatgtcgtgtgtaattgatgcattttcatactgtacagtgtctctaccacacaatgttgcataacgttgttcattcttgtttaaatacggataacttggtacatctccacaagttgtacagtctgaacgttgcattttactgaaaccaaatgaataatgactaccttcccaaatatcgccataagttatttttgtgtcaattggttgttccgttaatactttcatcgcatctcttaattgtaaacttgttgccatcgtcacggcaggttgaatgacccctactgtatcacatgttaaatttaatgctggcaattgtggtaccaaacagttaaagcaaggtgttttaccaggtataaatgcagcttctgtatatgtactctgtacaacaccaccataaatccaaggtatacgatatttatatgcaaaatcattaatcagttgtcgtgtttcaaagttatcggttgcatcaataataacgtcaacgtcctgtccatgtgtttccaaaaaataataatccacatgggcaatataatcatcaatatcaacatcactacgtaacgctagcaaatgctttttagctgcaaccaccttaggcatcattttcaaagcatcttcttcagtaaacaatgtttgtctttgtaaattactaaattcaatataatctctatcaacaatgattagtttggcaatgcctgctctaacaagtccttcggccacatgtgtacctaatgcgcccataccaataatcaacgcacatttttgatttattttgctttgacctatttcacctatttgtttaaataaaatttgccttgaataacgttcttgactcacattaagttatcctttctttttatcattactttcattatatgacgcgcgtcaatgtctctcaaaaaaactgcccctaaaaaagagtttaaaacatcattaaaatgctgatagaagcattcacttctacaattttaaatacgttctaaactctttaatggcaaataaatgattacccaattgtaataatttcatgagccatttgttctgcttcatagtttgaatgtgtcacaaatatgattggtatttgccattcgttgaaaatacgtttaactaatgtaatactctcatcttttgtagtatcatccaaactagaaaaaggttcatctaataaaattaaatctggtttcgtgctaagtgcacgtgcaagtgctacacgttgtgcctctccacctgacaatgtcataggatattgtttcatcaaatgatcaatgtttaaagtttgaattaattgatcgatgtgttcagatggttcagccataaaagtaatatttttatagaccgtcatattaggaaacaattggtagtcttgaaacagatatccaatacgtcgttgttgaattttaacattcacgttttttgccgtatcagtaagtaattgcccattcacttcgataatagcttcatctgctttacgtaatccggcaatcatatttaaaacagtagttttaccaatgccagatggaccacgaactgcataaatttttggttcagtatcatctatattgatgcgaattaaagtgttctttaattgatatttcacattgattttaagcatctagtcgacctccttatatttatctttattcaataaattaattgtagatataaccacaatagagaatgcgactagcactaatacccataaccacgcttcattttctctaccttgttccactaagaagtatatttctaaaggtagtgtattcgttttatttggaatatatcctgcaaccattaatgtagcaccaaactcacctaatgcacgagcaaaactcatcattatacctgctaaaatagagcgtttagctaatggtaaaattaatttgaggaaaattttcgtttcacttgctcccatcgttctagctgtattaatcattttcgtgtctatacctctgaagccttgcacagtatgttgatacattagtggaaaactaacaatgacagatgctatcacagcacctgtcaaagtgaacactacaggtaaatgtagtacattcgcaaagaattgaccgattggtcctcttggcgagaagatgattaatagaataaaacctaataccgttggcggcaaaacaataggtaatatcaataaactttccaatactttaacccacgaacccttacgacgatacaaccatttagatataaaaatacctaaaaccgttacaataatcgtactgattacagcaactcgtattgatatccaaaaaggtgttaagtcaggcatggattacaactccttatgctgcaaagtggtattcttttagtatttctttagctttatctgattttaagaattccatccactcttttgctaatttactatctgatgtagcaccagcttcgtatgtgattggcttcttaagttctacttctttaattacttttacagtatcaattttttattttgtttatataagtcagttttatacacaaaaccttgtttcgcattacccttttcaacataatttaatacttgttttacatctttagcataaacgattttactttcgacttctttaaataagttattgttatctaaatactgtttcgcatattttcctgctggtacagttttcacttcacctaatgctaatttatcattgtcttttaagtcttttactgaagtgtaatttgaatctttatcaccaattaatactagactatttttcgcatatttatatgtatcatgcgctttattcttgtcttttaatgcatctacatctttagtatttgcagacataaatacgtcaacaggtgcgcctgattcaatttgttttcttaatgcccctgatccaccatagttaaatttaatatcagcatttttatgctcttttttaaattctgaagctaatttcttggttacatctgttaaacttgctgccgctgcaacttgaatctcttgtttcttaccattgtctgcgtcatcttttttactttcattattatcgttagaattagagcaaccagctaatactaaaagcattgcaatcacaacagcaaataaacgtttcaatttcattgagtgaacccccatttttaataatatttacattttcattatacacttactattatatttgaaaagaaccgttgcctgtttatatattgattcaaacaattgtcaaatttgcataagattgatatttattaattgatgccctagtatgtatattctcgaattcaatttaaatcaaacagattgctcgctattaatttttatcaatcaaatttcaaacttaagcaaatatgttaaaattttaagcaaattgctttaaaataaagtttaagctaattaaaggggttagataatgaacaaagatgtatctttaggtcaaccaattgttagatatgaagatggaaaattattcaatacaacagatcaatatgtgacagaatttccacttacaattatggtgaatggtgaagaatttgcgactgttatatgcagtccaacaaaccttgaggagttagtcattggatttctggcttcggaaggtgccattttaaagcgagatgaattaaaatctgtactgattgatgatagtaaaggttttgcccatgttgaacttaataaagatttaggcgatcgctttcaatattccacaaaacgaatgattgcatcttgttgcggaaagagtcgtgagttttattttcaaaatgatgctgctatcgctaaaacatctatgtctaaaatcactttaactccaatgcaaattattaacatgatgactcgattacaaagtgcaagtcatatttaccaagaaacaggtggcttacataatgctgctataagcgatggtttgacattttttgtacatcgacaagacattggtagacataacgctctagataaattatatggattttgtattcagcgacatattactgtccgagataaagtattaatttttagtggacgtatttcatcagaaattttaattaaagccgcaaaaattggtgttggcgtcattttatctaaatcagctccgacaacgcttgctgtaaccttagctaatgacctaaatattacggcagttggatttattcgaaatggtggctttaatatatacagtcatccagaacgtatcattgattctgaacaataacatattcattatagtgtgtcataatgaacgatattctacatgaatcaacaatttaaacgcactatttttataagtataagtagctcaaaacaatttaaaaagcagtaagttgatttctactcgaaaccagcttactgcttttttattctaatacaaacctatcatcaatcgttaatttccaatatcttcttttaatatttgataacaaaacgattgatagacataaccttgctttgcatacatatcttttgctgtatcttcaccatctgcaactaatatgattggtttgtgattttttgatatggcgtattcacctatcaacgattgaattgtagatccaattccttggtgccgaaattgttctaatacaccaaatccatctaattcaatgtaattttcactttcaatgacatctacaacgccaataggttcattatttaaataagctactaagcgtttaatcacatctttttgataatgttcccttaccatttcttcatgtgcatctgcatagtcttttccaaatggcaaactaaactgatatgcaacttttaaataggcatctatatgcgactcgtcaacgatggcaatttcaacgtcagagttacgcggcaaattggcaagcgcatcactttctatggcatacaattccataatacctagttcaaaattcatatctttaaacatagccatccaatgattatcaagttgttcattttccgggaaactaaacgcataatgatttgaaccttgatttgtatgtaattgatgttgacgttctaagtctttcagccatcgctcttgggtaggcgtctttttatatatccatgtgttacttgtgtatcgttgtggaaaagaaggcgttaaataaatcaactgctcgtcgtcattttcaaatatagtgccgttacaatatatatctgacatacttatactagccattgacacctactcctttcacttttataaatttcaaagcaacttattcaattactttactatcttaaatatgattattttattcccataatttgacgaaactgcgagtgattaagtaaagctgtaccaatcaaacttgctacaattgcttttaatatatcaccaggcaaataagctaatgaaattgaaatagctttcgtaaatggtatgttaataatcatgcccataatcaatgtaccaataacatctaatgctataacaccaaaaactaaaataccaacgaataaaatccagaaattaatttcattgatgaatctatctcgaatcgccccaatcatgaatgctacaactggatataatagtaaaaaccctgctgaaggacctgcgaatacaccgatgccaccgcgaccacctgataacaatggcaagccagcaactactaataataaaaagacgataacacttaatgtgccatatttacgtcctaaaatcgcacctgctaagaaaataccaatgttttgaagtacaattggtactgaagaaaatggtagtggaattaccggtaccaatcctaaaatagcgataatcgctgtcattaaagctgtatatactaactgttttgttgtcattttttacttcctttcgtatttcatgaccattattatagcaccattgtaaactttaagaaatgaaaagtttacaataagttgttctatataaattaaaaccttaattattctacacagctgttaatttacttttttagcaagtgcagttatataatcaaaaaatgcgttgttatctacatgatttatgacattaattttgcgcccatctttacactcaaatgtcttaccttgacttggtccataacttattacatcgacttttttctcaattgaatgaaccaagtccttgttaccaatataagcagtcgttaaaacatcccataaaaagtaagtagaatttgttataaagtgtgttaatggtggtaccgctgcataacttactcctaaaaaatcaatgcccgtatattggcgttcattcgcccatctttgtctaacatctaacgttagcggtacttgattcgtactttctaaagcaaccatatcaatctctatatcgctatcaaaaacaattttaaccgcttctggatcccaatatgcattccattctgcagaaccatcatgctcaggttcttcaacatttccttttggtaaaaaggtgccacccatccaaactaatttttctatatactgaacgatagatgaatctttttgtagtgcttttgctaaatctgtaagcgggcctgtaaataataatgttactttttctgattgtctctttaaagtttgaataatgtcttcaaaggcttctttgtcgctcacatttgaagcaacatgtttgactggctcatttaaaattggcaatgcgtccataaaaaaggcatgcatacgccattctttaggaaatggattttttcctcgttcatatgatggcgcaacttgaatatcttcatttgaaaaacgattaataatttttactgatgcgctcaaagatggctctaaataacaatcagcaccaattgtactgacccctatcaattgaacgttttccatttgtaataataaaaatagagatactaaatcatctacaccaccatcgtggttaaaataaactttcttagtcactcgaaatcccccttacatttcattttccattaacaatattatgtttttataaaacgttgttatatatctttctacaaaatcataacattctgttgtaatccttttaaacctcttctttaattgaaagccattccctgatatcccttccataaagtatgcactaaaataattatgatataacttattaataaagagatacattgagctattttctcaggtatactactttagctataataatactaatctatcattaattaaattgaacgataacaacggcacttattatttaaaaaaatacaaatatctaactttctagctataaaaataagagcctaatacaatatcaaaagattgatatgtttcagactctcatttcactaacttatatagctgaattattttgcagctttaattaatttttcttttaaatctttacgcatgaaatctaatgtataaggatcgttgtaccagtatgtaccagcatcaactttaacaatatgtccttctttagtagctttcaaattcttccacatgtttgttgattcgtatcctggtgtaggtttaccttcacttgtactcacaatgtaatcaccagcatatttttcaatttcttcttgtttcacttcagcccaacctgcttttgcagttaacttttgttgttctggttgcattttcaaaccaaatgcttgatataatacttctccaccacgaccccagttatcgccgtaagtgtataattttttatcaaattcatcaaacaatgacactgttgcatcttgtccaattgcttttttaatttctttaccgtctttagcagttgtttcttcccaatctttcttccaagcttttactttatcttctttaccaacaattttccctaacatttcttgttgttctaaatatttatgcttattatagtcaacaactactgttggtgctactttttgatattttttaatatctttgtcagtagagtatacaataattaaatctggcttttctttagcaactttttctacatcgccatcaccaatttttgtaacacctttaaatttatcttttaatactttgctttgatcgacttgttgatttacagctacaatgtttgcacctaattttttaagtccaccagcatatgttggcgcaactactgcaatgcgtttagggtctttcggaatatctaccgttttgccatcgtccattttataagatttagtttcagctttgttatttttttcaccttggttcccacacgcagctaacactaataacataattattaatggtaataatagttttttcataatttcctcctattgaaaatgattatcaatcattcaaaaattatacaagattgcatatacatttacaatagctagtgttatttattttttattttcgcaaaaaatttaacaaaatatcttaacatccctataaatccccacaaaaaaagggtaaatccgaacgtcaaatttcatctctttatgccaatcaacgatcgatttaccttttaaaatttaaaatgtatctgtaatactcttagcaatatttgtatatgctgcatcttccataggtggattgtgtaatcctgcacgcatgtcacgatagtaacgttgtaatggtcgattcatttctaagcttttagcaccaactattctcatcgctaaatcaatcacttcaagcccttgattcattaccatcactttactcgcacttgttggatttcttatctgactgtcatctttatattgttgatacccttttgctgtactccataaaaattgtctcgcacataacaatagcgtttccattttccctaaattttgttgcacagttggcaatgttgcaatcgttccttcaatactattagggctatgttggattgcaaagtctacagcataatttctagcagcttgtgctatacctaaataacagcttggtatatgcaatatccaaccatttggcgctttacttttctctgtttccactaaatgttttaatggtacttttacatcatttaatattaaatcatgactttctgtcgctcgcatacctaatacgtcccaattatcggcaatttcaacaccaggcaaattcctgtctactaagaaaaaaccaacactttctaattcttctatataagcagcaacaataatatgtgttagtgctttactcattgatgtatatgtcttcacaccatttaaaatatacccatcatcagctttaacagcatgtgtacttggtcttccccctcttgttggactacccatttcagcttcactaactgctctattaactaatgcaccattattaatttcaacagcaaattgctccaacatatcttgagaccataatttctgttcataaatttgtcctacgacactcacatgccaaccaatagataatgctgtggcaccatcaagttcgcctaaaaatgattgcaaaataaccatgtcttctatggtcgcaccttcaccaccatatgcttttggtaacgttaattttccataaccttctttaattaaccattcaatatttttatatggaaattggctatgttgatcattatattcagctttagccttaaatgtatctctaattactttgaatttttcaatccattttctttgaatttccgttgttattaaaaaggaattatccatatcattcatattagtcaccccacacaacacacaatataaattatttattcctagtttaacactcgactttaaaaataaaaaggaacgtgctgtgaacaattaaaagaaaactgataattcgattaagtatgcacttaattttatccataaaaatacaccttaaactatacaattcgctgtatagtttaaggtgatattcaaacaatattaggtttgatttaactatcaagcatctactttgtcatgtttaataccagcaaataataaaatccatgtcacgataataaatggcaatgttaatgcaggtaagccaaacggttcaagcaatgttgttgtacctagttgcaccactactgttaataacacacctaaaaaagtcgaaatataagggttaatcgctgttttaaatgtatatcctagtgcgattgccattaatacaaagttataaccgaataatccctgattaatatcatcataattaccacctaatagagctacaatgataaagcttaacaaactagctataacagctaagagtgttgcttttcttgatgctatcaatatgccgattaaaatacatacgccaccaattacactcgcttcgataaatacttgactgaatccttcaaataatgactgaatgaaatgtattctatcattgttgctaaaattaaccgtttcaatgttttgaggcattaactttaacgatgtatctacaaatttaacctgtcctgaaagtaaaattgtaaaccaagtcacaatgacaaaaggcatcgtcagcatcggaactttatatggtcttaaaacttctctcactgcagcagcaactggtaacgttaataaagttgctatcattgttataacaatatctaatcctgacttatctaaaaagattgttaacgcaatggcagttagcactggattaaatccagctaacccatcattaatctctgcctcactataatttataaaacgcgcaaaagtataggcgatgatgctacctacaatagccgctaatccaattgtccaatcggctacaaataatcctattaagataaataatcctgtccatttattactaattaacacaacctgagatatatttttcaaaagcacatctattatcttcaaatctttcacctttcctttgaatcattactcattaatatactactattctatgaaaagttatattaaaaactattttggtttttacataaatatattccactatttgttttcgattagattgtttgcttcaatatcggatatgctaaaaatataattttctaattacacattgaactttgtatattacttgtttatcacaacaattaggattaatataaattttgtaaattgtatctaatatgaaattgggggttttaatttgcattttacacaacgagagcaagacaaattaatgattgtagtggcggcggaagttgcacgtcgtcgtaaagcacgtggtttgaaactaaatcatcctgaggcattagctttaatcagcgatgaattattagaaggtgcacgcgatggtaagaccgttgcagagttaatgagttatggtagacaaattctaaacaaagaagatgtcatggatggtgtcgaacacatgattacagatatcgaaatcgaggctacgttccccgatggtactaagttaatcacagtacatcaccctattgtttaaaggaggcagtcaaatgataccaggagaaattattacaaaaagtacagaggttgaaattaataaccatcatcctgaaacagttatcgaagttgaaaatacaggagatcgaccaattcaagtgggctcacattttcatttttatgaagcaaatgcagcattagatttcgaacgtgaaatggcatatggaaaacatttagatattccagctggagcagctgttcgatttgaacctggggataaaaaagaagttcaattagttgaatatgctggcaaacgtaaaatttttggttttcgtggtatggtcaatggtcctatcgatgagtcacgtgtctatcgcccaactgatgaaaatgatgaatatgcaggtgtattcggagataacggtgctgaaaacgtgaataaaaaaggaggaaaaagatcatgagctttaaaatgacgcaaaatcaatatacgagcttatacggtccaactgttggagattccattcgtttaggtgatacgaatctatttgctcaaatagaaaaagactatgcggtttatggtgaagaagctacttttggtggtggtaaatctattagagacggtatggcgcaaaatcctcgtgtaacacgtgatgacgtgaacgttgcagaccttgtcatttctaatgccgttattatcgattacgataaagtggttaaagctgatataggcattaaaaatggttatattttcgccataggtaatgccggcaacccagatataatggataatgtcgacattattataggttcaacaacagatatcattgccgctgaaggtaaaatcgtcactgctggtggtattgatactcatgttcattttattaatcctgaacaagcagaggtcgcattagaaagtggtattacgactcatattggtggtggtactggtgcttcagaaggttctaaagcaacaactgtaactccaggtccatggcatattcatagaatgttagaagctgccgaaggtttaccgattaatgtcggttttacaggtaaaggacaagcaacaaatccaactgcactcattgaacaaatcaatgccggagcaattggattaaaagtacatgaagactggggtgcaacaccatctgctttgagtcatgcattagatgttgctgatgaatttgatgttcaaattgcattacatgcagatactttaaatgaagcaggatttatggaagacacaatggctgctgttaaagaccgtgtacttcatatgtaccatactgaaggtgctggtggcggtcatgcgcctgatttaattaaatccgctgcattttcaaatattttaccttcatctacaaatccaactttgccttatacacataatactgtagatgaacatttagatatggtaatgattactcaccatttaaatgcggctattcctgaagatatcgcattcgcagattcacgtattcgtaaagaaacgattgcagcagaagatgttctgcaagatatgggtgtattcagtatgattagttccgattcacaagcaatgggccgtgtaggtgaagtaattacacgaacatggcaagtagcacatcgcatgaaagaacaacgtggtcctttagatggtgattttgaacataatgataataatcgcatcaaacgttatatcgctaaatatacaattaacccagcaattacacatggtatttctgaatatgtaggatctatcgagccgggcaaactagctgacattgtcttatgggacccaattttctttggggttaaacctgaattagttgtaaagggcggattaattaactctgccgtaaatggcgatgcaaatggttctatacctacatctgaaccgatgaagtaccgtaaaatgtatggtcaatacggcggaaaccttacaagtacgtcaatgacattcgtgtctaaaactgcttatgaaaatggtatcaatcgtgcattaaatttaaaacgcatggtgcgtccagttaaaaatattagacaattatctaaagcagatatgaaaaataacagtgcaacacctaaattagacgttgatccacaaacatatgaagtatatgtagatggagaaaaaattacaagtaatgcagcaactgagttaccattaactcaaagatacttcttattctaggaggaacatagaatgattgttgaagaaatccaaggcaatattgccaatttgtcaaattcagaaaaacaaaagcacgtcgaaaaagtataccttgaaaattcagatcttgttaaacgtattcaaagagtcgttacagaccatggcactgaaataggcattcgtttaaaacaacctattgacttacaatatggagatattttatacgcagatgaccataatatgattattgtggatgttaattcagaagatcttttagtgattcaaccaagaacattgcaagaaatgggagatatagcccatcaattaggaaatcgtcatttgccagcacaatttacagagactgaaatgctagtacaatatgattatttagttgaagatttattaaaaagtttaggcatcccatatgttcgagaagaccgtaaagttaataaggctttcagacatatagggcattctcatgattgatcatacacacttaagattatttcagttctgtgattcacagtttccaacaggtgctttcagtcattcatttggtcttgaaacatatattcaacgaaatataattcatgacgatcatacttttattgcttggttaaaaatgtttttacaagagcaacttacctattctgatggtttagccatgcgtttagtttatgatgcattggaaaatgatgatacacaaaaagtattacacatagataaactgatgtttgttcaaaacttacctaaagaaacacgtgttggtgcaaaacaaatggggactcgcatggttaaattggctttagaactttataacagcccatggattgcttggtatcatcaacaaatgcaagataagaaagcaaagttaaatccagctatttgttttactatgctaggccatcatttaggtgtagatattgaaacgattattgattactatttatatcaaaatgtttcaagtttaactcaaaatgctgttcgtgctattccacttggacaaactgctggtcaaaagatagttactcacatgattccttatatagaaggaacaagaaagcagattttcgaattaaaagaagcagattttggcatgacagcgcctggtttagaactaaatcaaatggcgcatgagaacgtcaatgttagaattttcatatcataggaggttataattgtggcaaatccgattaaaattggtattggtggtcctgtaggtgcaggtaaaacacaattaattgaaaaagttgtaaaacgtctttcaaaagaaatgagtatcggcgttattacaaatgatatatatacaaaagaagacgaaaagatattagtaaattcaggagttctacctgaaagtcgtatcattggtgttgaaactggtggatgtcctcatactgcgattcgtgaagatgcatctatgaactttgcagcaatagacgaattattagaacgtcatgacgatatagaactaattttcatagaatctggtggcgataacttagcagcaacatttagtccagaacttgttgacttttcaatatatattatcgatgttgctcaaggtgaaaagattccacgtaaaggtggtcaaggtatgattaagtcagatttctttgtaattaacaaaactgatttagctccctatgtaggtgcatcattagaacaaatggctgaagatactaaagtatttcgtggtaaacgtccatttacttttactaacttaaaaaccgacgaaggtttggatgaagttatcgattggattgaacgcgacactttactcaaaggattatcataatggatgaacaacaatggactgggcaacttgatttaacagtgtttttcgatggcaatcgatcagtatcaagagatattttctttgaaaaagcacttaaagtgatacgtccagtttatctaaatcaatctaccattcctacattttatatagtaaatgtaggtggtggctatttagatggagatcgttaccgtatgaatgtgaatgtcgaagataacgctaaagtgacattgacatctcaaggtgcaacaaaaatatacaagacaccttccaatcatgttgagcagtatcaaacttttaatttgaaagataacgcatatttagaatatgtcgctgatccaatcatcgcatatgaaaatgctaaattttatcaacacaatacgttcaatctcaataattctagttcattattttatactgatattttaactcctggttattcaaaaactggcgaagccttcaagtatcaatatatgcatttaataaatgaaatttatattgaagatgagttagtcacatatgataatttattattgaatcctaataaacaatcgatcaatgaaataggttatatggaacattactctcattatggctctgcttacttcatacacgaagatgttaaccaaaaactaatcgattcagtttatgaaaccattagttcttatagcaatacattcgattgtcgtgttgctatttctcaattgcctacacatggttttgcagttagaatttttgcttatcgcacacaaattatagagaaaatacttggaaccatccaaagctatatcgcagaaaatatttatgatcgtaaacttgattttctaagaaaatattaaaataaaaagactagtgtaccttgtttcaagcttaataagctgaaataaggtatggctagtctttaactttaattaaagcatcttcaatatttaaattttaagttaattttatgtcccaatgctgaataaataacttcgttttaataaattgttatcgttcaatgttattaaacgcaattaaccttgatttaatttttaatgtattcttctaattctgaaatcagtttttgaatatttgctttttgtgtatctgtaacataaacaataactgttctttcgtcttgtaaacttcttttctttgataacaattttaaatcttttagcttttgtaaagctttagttaaatagtaaggtttgaactctgagcacttagcaatctctttagatgagatttcgttagactcacttcttaaaatatgatttaaaatataaatttcttcatagttcaaattgaacttcttttttgtatctctgaaaaacttcttaacttgaaatgttgcgttgactaaatcattaatgtcattaattttactcattattaaaccactcctctgatgcacatcttgttgtagcaaggttcacatgtaatttattaaatcgaaactctatccaactatgttataaagttcattctaaacaaataagtataaaaattcaatatttttattactagaatatggttaaatacatttatttcttataataatttgatgtttaagatattttgccaaattgaaaattattagtctgaatattttgtatcttaactgatatgtaaacttttaaaattttaatctatatcaacgtgtttgatttgatattttttatattaattggatggcttgctcacaaaatttataaaatataaaaaaagaagagctttaaatcataacgcatgccatttatctttaaatgcaatgagttatcattcaaactcttcttatcaacctacatacattgacattatactatcatatgttgttttacatattcaacaaacatttcaacgttagcacttttaatatcatgcattgggacattaccaatattaaatttgaacattatagtttgaccatcataatctatcttctctatttcattataactaatacttctataataaaattggccattcatatctacattcataattaatctttcatttgttgctataaatgccccttcaaattcattctcaccttgaacttgatactcaattattcctagcactgacggaccctttttttcagttggaaataaatcatttggattcacattatctaaaatcataatatccctcccacttaaaactataaactattcttcataggtatatgaaatacaagtgattaactatttattattaagcttaacttgtattcccttttcaagataattataacatgcttgaataagcatagtgactttagaaaacttttctcgcttgattgttacaataacacgcctttcatctaattcacatctctcttttttaactaatcccttcaaaattaaacactttaaaatcgggctaaccgcaaatatcgggtgatggaattcaccctgtaattctttaaccgtcaattgacctttatgcagatttaatattcctaaaacgtataactcttctaatgataattgacacatatttaaataacactttagattccgcaataattcttgtgacgacaataaatacgatacatagtcacaactaaaatcaaatgtatattgaccaaaataacgttcaatatagtcactaagctcattattcatatattctattttatctatatgcattttattaatcgaaatagtcaatttacgttgatccctttgatctcttcctttcaatagccattgatgattgtttaaataacttaacatttgaagaagggccatcttagattggatttctttcatttttaataaactatctattgaagcgctattggaatcagaattatcatatttaactaatagatttaatagtttcacttgagtcaaagtgagatgaaatgaatatttcaacatatcattaatgactttcaacattagtatgtgtgcagttaaacgcttaactttaaatttagacatctttaaaacctctcttaaaccatgcctatatctcaagatgatatttcaaatgaacaatactattgcttgagaccattaatgaatgatcataaatatttctttctataaaattagctttccaataactgtgttgttgcataatatcattcacaagtacaccattttcggaagtatgattatctttatctatacttaaaacaatttgtttagttttagcatggctaaattgttgaagacccttacacgataaacgtatagcgtctgaattctcatttaacaatgcggctggcaaacaaatgacacattgtacttcatgtttgaacttcgttacaatcatcgtgtcattttgataaataacaatccctcgtaattgattaagtatatttatgataaaaatgaatattgataatctagttaaatttatttctttgctcgattcacttataattgacatgtgcataataagtcctcgaaattttgtataatttgtcaaaagttcagaaaccttattaatatcagacattgtgattttttcttttaagtcattattctcattaatcaaatctacatcacatataattttagaacgtgcaatagacacctgttctatttgtcttagcggtaagataaaatagtctattagatgatcaatttctttatcatagcgcgtattcaactcttttggttccagatgatatattaattcaaatactcctatataattatctattaaacgtttcagtttttgaattgcagtagtatttaagtcgttaattaaaaatgcaatcttacatctattactctcaaaagtcatattaaaaattgtagctactagcttttctatcttgcctctttcagcactcgttaacaattccttatattcatgtttaatacgaaacactacatttacattgtaattcactatcttttgaagtaataaagtgatttgttcaatcgatagctcattgcttgtgtcgattgtaacaattatatgcaagttttcaggattaacacctaatctttgaatgatttgtttaatagtataataatccatccaataaaaattacttcctttaatataaatgtttttaggttgatacatttgactcctttttgtaggctcaaaaggtatatcaatctcgcgcatacttgaagaactttgattagtatcatcaaataattcaattatatttttatcaatttcaactaattgggaatggttaattgaatgagatgttggactatatctttttctaattaatttaggagtgttaccatacgtttctttaaagaggtgtataaaacgagaataatgattaaaaccatgactacttgcgatttcttcaataggcttcttagaagttaaaatatcaattaagcaatgctccagtctaatatgatttaaatattgaataaaattactataaggtgtcgctttaaacatgtcacttaaagctttgtttgtaatactaacttgattaatgacatctttcctatttatctttttatggtggttgtttgttaaataatcgtgcacttcttcggctactaaatgacgactaccatcgtatgtatttaatgacattaattcaacacacatgtaattaataatcttatcattagcattataagactgttgtttaattttgctgtagattaaatacttaatcaagattctaaaagtgctagcaacctcatttgttaatatcttgccacgcatcatatagtttgcattcataaacttcaaaaatgtctttgcacttacttcaacaacacaacatacactatcatcattaccatcaatttgatacaaatcattcaacataataatggtgacatcatttctttttacatcatattgttgtagattgattgaaactacacctgtaccttgtagccaatatataatttttaagttcgcttccttcacactactcattttcatacttttataaatatgtagtgaataattatctgtcatcttacatcctcacatatacaaatatattgatttactcctgtttgtctttctcaaatcaattgtcaacatctaatattcactaccaattatatcgccacatgttttttagcagtaacaaaacataaatcgattatatcaaataatacttttattaaaacatttttttatgctaaattaggatattttatccattaaatatacattttcatccaaataccaaagctttcataatcatagaaacttgatcgttcgtgtcgaatttttatgcattttctgattaaaagtcctatattatgcacaaaatatacatttagaattttcagtaatattacaaatttgtaacagacttattttcgaaacattcagttttcacaaagaatgccgtagttataagttttgcaaaatgcaaatttctatacttttaaaattctattgtgtcaagatattagcaaaaaattacaaaacgttaacaaagcacacaaggacgctaatttctgttatagtctttcttgtcgtttaattacgagagataacttataacattaattttgtcacacggacattacgaaaatattttagatttaaaatttttaggaggatatttttaaaatgaagaaaatcgctacagctactatcgcaactgcaggattcgctacaatcgcaattgcatcaggaaatcaagctcatgcttctgagcaagataactacggttataatccaaacgacccaacatcatatagctatacttacactattgatgcacaaggtaactaccattacacatggaaaggtaactggcatccaagtcaattaaaccaagataatggctactacagctattactactacaatggttacaataactataacaattacaacaacggttatagctacaataactacagccgttacaacaactactcaaataataatcaatcatataactacaataactataatagttacaacacaaacagctaccgtactggtagtttaggtgcaagctacagcacttcaagcaacaatgttcaagtaactacaactatggctccatcatcaaatggccgttcaatctcaagtggttatacttcaggacgtaacttatacacttctggtcaatgtacatactacgtatttgatcgtgtaggtggtaaaatcggttcaacttggggcaatgcaagtaactgggctaacgcagctgcaagagctggttacacagtgaacaatacaccaaaagctggtgcaattatgcaaacaactcaaggtgcatacggtcacgttgcatacgttgaaagtgttaacagcaatggttcagtaagagtttcagaaatgaactatggttatggcccaggtgttgtaacttcacgtacaatctcagctagccaagctgctggttataacttcattcactaattagtgatggctatgtttacgccaacaaggtttcaagagccttgttggcttttttaatttctatgaaaaaaatcgaattggtaaaaatctcaaaatttcgattttcaccaatccgattcactctgtaataaagaataaacaacatacagccattgacacacccaaatttaggcatgtcaaatcggctatacattgataaatttttagttaaagtacttacaaatatacttgccttcaaattctcaattaatttagtcattacaaatcatgacataaaacttacattacatatatcaacatgttccgctacaaaacatattcagtatatgcatagaggatatttattctaagttaaaaccttttcaaattataaccgctacaattataaatgattaaagtgtttcaacatattatatatattccacgctcacattaagttaaacgtgaattcgatgactttttaatacctatccctgtaaaaccatagataattgctataattgcgcataaataacatggtactgtccatatgaaaaattcttcaacagagacatgaagttgattcgtatagtaaatacctgatgttccccatggtattaaaggtaagaccatcgtacttgagtcttcaagtgttcttgataaaacggaacgagagacttggtatttttcgaacaaatctttcattaacacaccgaccataataattacaatcgaagcaacacctgcagcgaatacaagcgcaatacaacaaataacagtaatacatattaaacttcctacagaatggatgcctttagaaatagtagttaataagacttctaaacatcctgctttttctacaatacctgcaaatgcatatccgcaaaatatcgttactaatatttgggtcatactcatcataccaccctgttctaacaagcttttcacactggatgaaatatgagactgatgtatcattgattcgttaaaaccactaaatgttgctttgaaaccatctgtcattttgaaatgatgattaaaagtccccactataatggcagaaaagcttgatattagcatagctggcactgtagccattttaaatagcaaacaaacaatgatcacaattaagggaacccagacccatatgttaatttgataaatctgtgcaagctctgataacaaagtttgaatctgtttatcatttgaatgccctttaaattgaaatccagcaataaaccatactaataaacctatgattgatgcaggtatcgtcgtccacatcatcgaatgtatatgtttaaatatattaactttagtaacaagcgccgctaaattagttgtatctgataatggtgacattttatcgccaaacacagcccctgctataatagcacccgctgccatccctggaggaatccccaattgattaccaatagaaataagtgcaatccctgcagttgatgcagagccccatgctgtaccagttgctacagatgtaacagcacttataaaaaaggctgatattaaaaaatagcttggattcaataaatctaagccataataaatcaaggctggcactgtgccagaaaacatccaactgcctactataattcctaccgctagtataattaaaattgcaggcattgcagtatttaaacgttctgcaatgcctttttctaaatcttgccatgttaagcctacacgttttgcaatccatgtggcatatgctgaggcaataattaataatacttgaattggaatatcaaaaaacacaaagcctgttacaacaacaataaccattacaatcattgtcgaaattgattctaaaaaggtgggttttcttttcatcatctatcgtccccttcgcttattgatgagaaacctcttttcttcaatttattgcttttgcataatgctatatccttttctatcttcaagccatcatttattttaaatatttttctaaatcaagcttatctaaaccaatttcttcaactgttaagccttcctcaaagaagtctctctctaaaatggttgatgcaattacaattactgcatctatatttggtgtcggtacatcaataacacgacctaagcttgaccatagtactaaaccatatgcaatatcttcagttaaatatctgctttctacatgatttggtcctggaatttgtgaaaatactgggcttgtattaaacaaacgatttaatggttcatcttctttatcacgttctaaataaccacgttcaatacgtgattctttagctgttgataattcaaaacctaatctacggcctaaattcaaacgttctaattcgattgcatgaagtaatctaactgtatgtttagtaattccttctttatataaagcgaactcgccagcataatcaatgcgaccgacattcaataatgttggtcctggatgcacttcaggattaccattttcaagatttgttttaattaagctttcctcttttactaaatgatcataaatacttgaaactttgtcataacaatcatttagacagcttctatcatatgttgaaaagaagatacgacgtacatttagagataaatcaactgctgcattttcaaaatcgacacgcgtaccatacgtcaacgtattagcttccgctagttgtggttttgtttcaatatgtctatcttctaaaacattcataaaacgaattgaccccattgctgcagccatgttgaagaatatcaactgattatcagttacatgctctgccattacatcagcataatactctatgtatgaagatggaataatcacttgaacaatttcagcatcttttaaaacatattccatatcatcactaatatcagtgaattttacgaaacgttcatcaccttcattattaaaatcaaatccgcccttttcgattgcgttttgaaacttacttatagattgattacgacaatataatttaacatcgtggcctttgctcaccatatctactgctgccgtaactgcgccatttcctgatcctacaattgctattttcataaacaaccctctttctatctttggttaaaattaaaaacaaattatacgtaagacaatataaaaatgatgcgaattcattacgcatcattataaatgttaagtatatataaccttaaattaacctatttaaacgccgacgtccaccaattatttttatttttaataattgtttaataaacatgtttatttttgattatattttgttatagttaaagataatattacaattttcaaaggagtgtctaatatgacaactgaaatgaacgacgtaacaaatcatcaaccgaatcgcaaatccaatgatgagaacattatggcgatgcttatctatttattaagtttattcacatctattattggtccactgataatatggttattgaaaaaagatgaatcgaaactagttgatcgtgctggaaaaaattatcttaactatacgatttcttatattatttggtctatcgttttagtcgttatcactttaataggcgttttcctaattgctacagatattgatttcattattattataggtttcatcattacgtttatcggtattttatccatattcgctttctcaatattatcttttgtattcacaattattgcgtgtgtcaaatattataatggccaagaatatataatacctttaacaattcgatttatttaaacatattacaaataaatatttcctattaattatctgttaatctcattgtaactttgactaatttttattacaaaattagtcaaagtttttttattcttttacaaatcaataacattccccacaagaagcattaattttgttaaagtaactattgtcatcaattcgagatgtgagaataaaacagtcgctacgttttatttataaaaaaagatatagaactttggaggactttattcatgaaaaaattagtaacagcaactacgttaacagcaggaatcggcacagcattagtaggtcaagcacatcatgcagatgctgctgaaaattatacaaattacaacaactataactacaacacgactcaaactacaacgactacgacaactacgacaactacatcatcaatttcacattctggtaacttatacactgcaggacaatgtacttggtatgtatatgataaagttggcggagaaatcggttctacttggggaaatgctaataattgggctgctgctgcacaaggtgctggattcacagtaaatcatacaccttctaaaggcgctatcctacaatcttctgaaggaccatttggtcacgttgcatatgtagaaagtgtaaacagtgatggttcagttacaatttcagaaatgaattatagtggcggacctttctcagtaagttctagaactatttctgcaagtgaagcaggtaactacaactacatccatatttaatataaacacgatgatacatattgtcttgaaacttaattctagtacatatgtcatcaaaaaactttgagctttcctttataggagaagctctttttttgctatttttcgttgccacctacttatttatatttcctcccatattcaaaatattaattttttctaatactattaactttaaaactacgttatctaatttaattgatccagtttttccacattacaatattcatagttctacagtgcctaagttatatcgcctccatcaaaagtacgcgcttacatcattgatacacaagacatcatgacatagttgtatactgtctaatcttctactatactaagataaaaggagtgatcttttatggaaaaagtttatgttgctggtgcaataccagaagtaggtttaaaacttttacaagaacattttgaagttgaaatgtatgaaggtaaaggattagtcgataaagacactttaattaaaggtgttaaaaacgcgactgccttaattagtttattatctacaaacgttgataaagatgttatcgatgctggtaaagacttaaaaatcattgccaactatggcgctggttttaataatattgatatcgagtatgcccgagaaaaaagtatagatgttacaaacacacctaaagcatcaacaaacgcgactgctgatttaacaattggattagtacttgcagtagcgcgtcgtattgttgaaggggaccaattatcacgtacaactggatttgatggatgggcacctttatttttcagaggtagagaagtatctgggaaaacaatcggcattatcggtttaggtgaaattggtagtgcagtagctcgtcgtgcaagagcatttgacatggatgtgctatacactggacctaatcgcaaagaagaaaaagaacgagaaatcggtgcaaaatatgtagatttagatacactattaaagaatgcagattttatcactatcaacgctgcttataatcctaaaatgcatcatttaattgatacagaacaatttaaaatgatgaaatctacggcgtatttaatcaatgcctctcgtggtccaatcgtgcacgaacaagcactagtgcaagcattgaaagataatgaaattgaaggtgctgcacttgatgtatatgaatttgaaccagatattaccgatgacttaaaatcacttaataatgtagtattaacaccgcatattggtaatgctacatttgaagcacgtgacatgatgtctaaaattgttgctaatgctgcaattagtgccgttcaaggtgagaaaccacaatttgtcgttaactaataattgaatttattataataacattataaaaacaagaacccccatatgttgagctctcgtttcaacatacgggggttttcatattgttgtattatttttctttcgatttatataagaatttagtttgtccagctgctaatgcatttggcatcattttcataatacgatttctaactgcaacaaataaacgactacgatattgggcaattttaccgatttttctagaacgcttaattacttttgcagtatgtttgacacgtattttatcataacgctgtaatgctttttcaaagtcgtatgcgttaaaacaatttactaatacgatagcatcttccattgcttgtccagcaccttgccccatattaggcgttgtcgcatgtgctgcatctcctagtaaaatagtacgaccataaacaaaagatttgagtggtttcaaatcataaatattatgcaataagatacctgtttcactttgtttgtctaagatctctctaacttcatttggatagtgattaaagtatgcttgcaaatgaggtttaccaaacgaactatatttatgattgttttccttcgagttaattgtaatgaaccaatatgcttgattatttaataacggaacaatacctactcttccttttcttccccagtattcttttgcacaatccggatgctttaaatcaatatcatcaattaaacctctaaagcatgtatacccttgatataatactttactgtcagcatttacagattgtctcactttagaatgaattccatcagcaccaatacataaatcaaatgcttcactttcttgttccgcgaaatgtatggtaactttatctgtctcattatctatatgcgtgacttcatgatttgtaaatattgcgtcatcttttacataagatttaataatgtcaattaatgtttggcgtggtaacgtcacattcaatgtattactttttaatttaacagtagttaacaggcgatctttgtcatctaacactgtcattgtagataagatttgcccagcatttttaatacctttagctaagtcatgattacctagttttttaagcacattatctccgataccaatcccagcgccaatttctttaactgactcatttttttcaaagactttaatagtatgaccttgttcttgtaataatgcagcagctgttaatccaccgatgcctgcacctataattgctatcttcatattgtcacctctatatttttcattcttttctattttatcacatgcactattgtttaaaaatgactcttggaactaacgtttcatttttaaggacttaagtgtattatctgcaccattgtatattacatgcacatttagacagcaatattcatttacatcatgtacatttgtaacaatgatgtgggatatagcatatttgatgctatatagcgttttttgttaggttaaaatccatttaactaacacactcagaatgcgctaaaggagctcgaaacaataaattgttccagctcctttaagcaccgatgtcttatttataatatgtttgtctaatatcatctttctttataccaaactgcttataggatttatccattaatttggcaattttatctgcccagcgaatgtcactcgcatattgatgttgcgcaggattttctggattccatcgcatttgatataaattcagttgattgttttcaaaatattcattacgaatgaactttgcaccaccaataatcgccttatctggtgatgtccattgttccttttcagcataacttttcccactacgaacagcactactatcgaatgctcctataccaaaaaagttgtaatagcgttttttcccatctttaatgccttttgctaattctgatttgccgttacctgtttctactaatgcatggctaacaagataaatgacattaacctcatatttttcttgagcttctagaaaaactttccctcgattttctaaaatccccttaccttttagcaattggttaacttcagattccgacattggcactttttctgtgatatccatatacttcatatcattgtctttatgtgaaatagtcattgctttagcaatttcattattatttgcttcaacaaatttaccatcctcttcttttgtctgtacaatacctttcccttgttgcattgaaacagcctcatcaaaagagtaattcacatcatttttaaacaatttagtttcattcacgatgagtaatacagcaaaaacaactaaaataactatcaatagtagcgttgaaatgcgtaacttgaaattcttcttcatatagacaaaacctcatttttcttacttagacaataaaaaatatgccactacaatcgctaatattacgattaaaaaagaagcgttaacgattactttcatcgttgttctatctctgaacatcatattaaagacaactagactaattgataatgaaacagcaaaaaaagtaatagctaacactaatttcatcataaatagacagactaaacctatgactaataatgtattagaaattacagctgacgtttttaacattctcgaattaatatgcactcaccctttttatttaaataacttacataatcataataatacatgatgtttcataggcctgtcgatgattgattcacaatagcacgtgatttttttgtttttcaatattattcatttattccatcaaaaacaccctttttaatttttacaaaaattaaaaaaagtgctcctacactgcttgcatgtagaaacactttttcattgtaatgttattcttctcgagacataccttttagcatattaagcatgtatgttaaactacggttcatgtcgtcatctttcaatacgcccaatagacttcttatagttgtcttagcatttggactcgcttgattggcaacgtgtaatcctttattaactttatttaggaagtcgcttaaatctgatacattgagttcacctaataaaaataccattgaagccatattagataatagccctgtataaatatctttattaagttcaactgcaaatttatttatgatgacttgacgtcctcgaattgcaccatttaaagcatctaatagttttgcatcatctaatgttttaataagcttgattgcttttaatatactatctttattcgctgcaattgcctctgtaacttcatttaaactttctaacttaatttgttcttctgatttttctaagcgtctaattttagaagatattctctcagccattatttatccacctgatttcccgggaaaacataatctgaacgttcccattttttctgtacttgaacactgtactgcggttgacgttttttattgacacggaaattattagggttcaacggtgacttaccacgtttcgtaattacctccaaacgacagctagtacgtttataagatggtgtatccgtgtattgatcaacatcactattagttaataagttaattgcacctagatctccattttccatcgcatcattatttaatggaatatagatttctttacctttaacacgatctgtcacgtgaacttgtaataccgcttctcctgtttcagaaatcagcttaacttctgcaccttcatgaatgcctctatcttcagcaagctctggagaaatttcaacaaatgcacgtggcactttgtatttaatcattggtgtttgataagtcatattaccttcatggaagtgctctaacaatcgaccattgtttacatgaatatcataaatttcatcttgcttaaagtaattatcaaatgataatgggaataattttgctttaccattatcaaaattgaatccttctaagtatagaataggctcatcagtaccatcaggttgtactggccattgtaaactattgaatccttctaaacgatcataacttaccccagcatatagaggtgttaagcgtgctacttcatccataatttcactaggatgcttgtaattccaatcaaatcctaatctattagcaattgcttggaaaattttccagtcaggttttgaatcaccaagaggttctaatgcttggtataaacgttgaatacgacgttcggtatttgtaaaagtaccgtctttttcaagtgaaggacttgctggcaatacaacatctgcgtatgttgctgtgaatgttaaaaattcatcttggactaccatgaaatctaatttttcaaacgcagcttgtacaaaattaatatttgaatccacaatacccgtatcttcaccatataagtacaatgagtgtacttctccgtcatgtataccttctaccatttcatgattatctttaccagcttttggattcaatttaacgccatattctttttcaaatttagcgcgaatatcatccgcttcaatactttgataaccagtaatcttatcaggcatacttcccatatcactacatccttgaacattattatgtccacgtaatggatacgcaccagtaccaggacgacgataattacctgttactaataataagtttgaaatcgctgtacttgagtcactaccaatgtcttgttgtgtaatacccattgcccaacaaattacaacagattcagctttagcacattcttcagcaaatttaatcaattctgattcaggaatacctgttgcttcttcagcaaaagccattgtaaatgtttctaatgatttgtaatattcatcaaaatcatctacccactcatcaataaatgctttatcgtgtaaatcatgatcaataatatacttagtcactgcacttaaccacgctaaatccgtacctggtttaggttgataaaaacgatccgcacgttctgccatttcatgttttctaatatcaaatacatgtattttttgaccaaataatttttgtgcacgtttcatgcgtgatgcgataactggatgagcttcggctgtattagtacctatcaatacagacattgccgctttttctaaatcttcaatactacctgagtcaccgccgtgtccaaccgttctaaataagccttttgttgcaggtgcttggcaatatcttgaacagttatcaacgttatttgtgccaataacttgtcttgctaatttttgcattaaatacgattcttcattcgtcgctttagaagaagaaatgaatgatagtgcatctgggccatgcttttctttaatagctgtaaaattatctgcaatgacgtttaaagcttcatcccattctacttcatggaactcaccatttttccttactagtggtttagttaatcgttgatctgaattaatatgtccccatgaaaacttacctttaacacaagtcgcaattttatttgctggagaatcatgtgatggttgtacttttaaaatttctctatctttagtccaaacttcaaatgaacaacccacaccacaataagtacacactgttttagttttcttaatacgctctttacgcatttctgcttctgaatctgagattgcaaatagtggaccataaccaggttctgcttttttagttaaatcaatcattgctgctaatgaaccaggttccgtatcagtcatataacccgcattaccttccatattcacttccatcatggcattacatggacataccgtcgcacattgaccacaagatacacatgaagactcattaatcggtacatcattatcccaaataacacgtggatgttcacgatcccaatcaattctaatagtttcattcacttcgatatcttgacatgcttctacacaacgcccacataagatacattgatttggatcataacgataaaatgggccgtaatctttttcgtatggcttctctttatattcatacgtttgatgctgaagcccccatgcatccatcgtattatgaatttcacaatcaccattattataatcacatactgtacaatacagcatatgcttttctaaaattcgatcaagcgcttctttttgagcatctttcacatcattgttcacagtatttacagtcattggacgatcaatcaccgtactacatgaacgttcaattttaccgtcaatctcaacagtacatgtatcacatgtttgaattggtcccatcgactcgttataacaaattgaaggtacaaaagtatcttgtgatttaataaattcaagtaaattcgtacctggttctacaagataatcttttccatcaagtgtaaccaccaaatgttcttgcatattactcaccccgtctatatatattttccgtaaatgacttttaataaattgctcatatccacctaaaataacgatgccccacacatctttcagatagaattaatttaattgtattactttatgtactagttgttaagtaaaattttgtattttgcctttttacaatcatttttatttgaaatattttgcgcgaaattaaatcatctttttgtttaattgaaaataattatcattattagttttccaattatctgtttcacgctttttgccatatctttcacaaccttattaatgacaatatttaataatcacctcacctaaaaatcgttatactatttataaataccctttttctgaaaattaataacccaagtttgataaatatctactatcatttagaaggtaatatttatctttaaattaaatttgtaatggattaatttataaaaatcaaatcaggcattaaataaaatagcccataaatacaaagtgttatcaccttctatttacgggctattagttctattcgttattctatttacagatcattctatctaattaatttgtgtacaattttgataacttattttcccttagtttactactctagattatcttttaataacttagtactttcagcttttgactgctcactaggaatgaagtagtacaatccgtcactttgaatgccgccttgaccactcaattgatgtttattaatcgtgtcattagcatctttataattgcttctaatcgtattcaaatcacctaatgttaaatctgttttaacattattttgaatttcattcattagactattaaaatgtgtaatcgatgatgggcttgcaatcttattggccatcgcttcaagcacaatttgctgacgttgttgtcgaccaaagtcaccaccagcaccttcttctttacgacttctaataaacttcaatgcttgatcaccatttacatgtgtctgctgtccttttgtaaaacgaacaccatcaacagtgaatgtatcattacttactacatcaacaccgccgatgctatctatcatattatgcaaaccatccatatcgattgtcgcataatgatcaattggcacattcattaatttttcaagtgatttaacagccatatttggtccaccatatgcataggcatgtgcaattttttcagtagtaccacggccaacaatttccgctcttgtatcacgcggtatacttactatttcagttttcttcgttttagggttgatagataaaatcataatactatcactacgctctccgccaccctttttcttacgatcagcatctgaatcgacaccaaataaagcgattgtgaatggatcaccatcgtttaaactcacttttttatctcttaattctgaatgattgcgatctaacggattgtgtatcttattaccagtaataaaaattttagcagctacatacacaacagctacaatcgctaagattactaaaataccgaatacccataaaaatatttttttcggtaggctcattttacttttagacgaacgtttcaatcccaccactcctttactattccttacatactttgtctgttttctctatttattatatagtaaaataatttttttactatacttctgtagacgtataactattttttatcattttttatctctagagaatatctatctgtatttttgataaccaccatttgcatttaaaattttaagtaccgtttcatgacatgctttattacttataataaaaggtgcaccctttaaatgatcaattgccttaccatctaaagtcgtcatttttagattcaatagttctgcaaataaaaactgtgcagcaatgtcccaaggtttaggatttgtattaatatgtgccccaaattgaccttttgccactcgcatagaatctaatccgcaagcaccaactaaacgataactaaatgaggcgtcaaataaatcttgcaccgtatctagattcatcacttgtgcattaaacgatataatagcgtcttccaattttaacgatggtggttcttccatcttaattccattacaaaaagcaccttctcctcgtattgctttataaagctttttatgcggataatcatatacgtacgataacattggtttaccttcataaaaatacgccaatataatacaataatcttcttgctgttttactaaattggcagttccatcaatgggatccataatccataaatgattaatttcattcgtaatcatttcattacttttttcttccgctaatagttggtgttccggaaaatgtgttgctaaaaattgttggaattgttgttgaatctgtttatctacatttgtaactaaatcaaatcgatgacgcttagtttctgtagtcatttccataattaattgcggaataacattgtctatttgtttcaaccacgaacatattaacttatctatttgctgtaatgttttatctgtcatttcgtccaccacttctcatatcattatcattttattattaccctatattaaaagaatcaacaatacaactgaagacttcttcattttatgcataaaaaaatcggctagtcacgtgctagccgacaaatagaaaggaaagtaagtaataaatattgaagatgttgtgatgtaacttgaacgattaaaagctatctgttatatagctctacccctttgtttaatcgctccccctgttacaagtaatatcatagcacaatcttttttaaaatgtaagcgttttccacaaaatttttacgatttttttaaaaagatattgaaaatgtcctcattgtcactcttatgttatactttgtgtaatatatcatcttttaggaggtggctgtcatgaataaagctgaaaggcaaaatttaataattactgcaattcaacaaaataaaaaaatgaccgctttagaattagctaaatattgcaacgtatccaaacgcacaattttaagagatattgatgatttagaaaatcaaggtgttaaaatttatgcgcattatgggaaaaatggtggttaccaaatacaacaagcacaatctaaaattgcattaaacttatctgaaacacaattatcagccttatttttagtgcttaatgaaagtcagtcgtactcgacattaccatataaaagcgaaatcaacgcaattataaaacaatgtttaagtcttccacaaacacgcttaagaaaattgcttaaacgcatggacttttatattaaatttgatgacacacaacatatgacactcccaatgctgttttccgacattttaatttattgtacagaacgaaatgtgatgttagtagatcatagggttgatgataatattaaagctgaaaacgttatatttattggccttttgtgtaaacatggacattggcatgcagtcatttatgacattgctcaagacaaaactgccgaactcgaaattgaaaatattatagatatttcgtattcattcggtaagacgattcaaaccagagacatatccattgataactatcatcaatttttaaaccccatcgattcctaaaaaacagcagtaagatgattttcaattagaaaatatcttgctgctgttctctatttatacaatacttcgtattgaatggcttcgctttcctagggtgccgtctcagccttggtcttcgactggcactgctccctcaggagtctcgccattaatactacgtattaacatgtaattttactttgaaatacttaaaaaaataaaacactttgcccaacttacactaccaatagaaactgctgttagaattcctcaaaatgatatttcgcgatatgttaatgaaattgttaaaaagatagctgatagcgaattcgatgaattcagacatcatcgtggcgcaacatcctatcatctaaaaatgatgttaaaaatcacctcatattcatatactcaatctgaattttctggccgtagaatagaaaaattacttcataacagtattcgaatgatgtggttagctcaagatcaaacaccttcttataaaactattaatctttttagagtgaatcctaatactgatgcgctaattgaatctttatttattcagtttcataataaaatgcatatcaaaaaagctgatttctatcaaataattaatagaaatcagcttttttcattgcctaaaaacttaatgtcccgacctctttatctacgcataaatacttattactgatataacgaaagaaacaaaattatttgctatatgtaatgcaattgttgaacctaggtttcttccagattttaaataagtgaaaactaatatgatggatagtatgagatatggaccaaactcaaacggcgactttgcatcagtcacatgaataaatgcaaataagaacaccgaaacaatactcatagctataaaattaaacttcttacctaattctccaattaaaatatgtctaaatacgatttcttcaactattggacctacaatcacaattaataagaatgctacaggtaaaaatgcaggcacttcaaacattttatttagctcaagttcattggctgtttcactatattgcaaatgtttaggtagaaactgtgtcatatattcatatgtataaattaagatgagagcaataatatacgttattgacaatctaagccaatattttttgatatacgcaaaaccagctcgaagccttgatggcatcacttttaaatgaaataaataaaatgcgccaatcccaatcgtatatgctaaagcttgtgtgatagtcgctacaaatatcagattactatcgatttcataataaccaaacaaaattggtcctatgtaagctgcaattgtgagtgcataaaatataacacctataattggaattataagcaaatctctccatgctatatctttaaacgtgtatttctttttttcattttccactgttatatcctttcctgtttaataattgatttttggaggtacttctacatgataaacgaaactaagtatatgagacaacaaattactaatttgattcaaatcattgatacgattaaatataatactttaatgacagattggaacattcaaacgcatatttataaatttaaccaaatagttactaatgaattgaataagttcaaaggctttgaaacatcatatataataaacgaaaatcaagtttcctattatgaaattataacactacttaataaacgtcccctccgacaagtcgactatggtaacaaaattcaatatcttaatttttatcatacagaactatctaacgcattatttgcaattaaatttgcccattaacctatttttcataaaatgtcatttaaacaagttatttattaaaattcactttattacataaattatacaattaaaaagtttcttcaaattgtaaagatgcattaatcgagttataatcataatgattaagatggtagatttagtcttatataactacatttactaagatttaaatagatgagtacataatgtataaattgggaatatacagtatgacttacggtaatatatcaatatattgatatattatttgcacatgggagtatgctattttttatctatacatcttaaaaaaatttacagttttacaattcaatatcattaaacaaacaacatattcagcttatttttcattctcttacgttacaagttgtaaataccatcgcgttaaacaacaatagccaacgctaataaaatatattgcgttaaagtggagtgattaatatgtcaaacgtactaacagaaatagatagtcaatatccatatatgactaaaaatgaaaaaaagatagctaaatttatactaaattcacctcaaaaggtgattaaaatgaggtctcaagacttagcaagcttattagatattagtacatcatcagtcattcgattcagcaagaaaattactgatggcggttttcacgacttgaaaataaatatatctaaatatgttcctaaagcatcatcaatttacaatgttgaattaatgaataacgaaagcacagaatctttaagaactaaactccatacacgtactacacgcgcacttaatcatgcaaataacgaattaaatgataaaactattgatcaaatatgtcattgtttaaaacgttctgagacgatttttatatatggttttggcgcatcttttgtagttgctaccgacttataccaaaagttatcaagaataggtcttaatattcaacttgttcaagaaacacatatttttgctacattattagcaactcacaattcgaacgacagtgttattcttattactaacaatggtacgcaaagtgaaatgcaatcaatggttaaagttattgatgactaccatatacctataattacaattactagtacaagggataatcccgtagcacaggcatcaaatattgttttaacttatgggaaaactgatgaaaatgagatgcatatgggagcaacaacttcattatttgctcaaatgttcactattgatattttatattatcgttatgttgcattaaattatcacgcatcattagatttcataacacaatctaaaatggctttagataactatcgtaaacatttatcaaatattaactttaaacattaacagtcttatataaattctttaatcatgtcatataataatttatgcatcattttcaaagcttacatgtcttttatcttgtataacatacgcatatgaccaatgatttgataaggccattcaatttcttatattaaaaacaaacgcagttgattaacggattcattccatatatcaattgcgtttgttattttaataatgctattttttattttaaagcccacagtaaaaactaacgataatattgccacttataagtttttcacactacaacttcgatttaagctatatttataaaaaaatgcgcctactcataacattctttggctatttaactttaataagctagggccaagtttgtcataagataagcgcacattataatcatactattttgcttttacattatttttattatatctaataaaataataaatcgttacaatcgttaagaagatgacaccaataagcactgatattctagtttcaacattaaataccataccaaccaatactaatattaagaataagattgttaaatagttagttactgcgccaccaggcattttgaatgggtgaccttccaattcttcagggtgtaattttctaaaacgtaaatgactgaataaaatcataaaccaaggaatcatacctggtaaaatagacgcactataaacgtatacgaaaatactcttcgctccatcgatatataaaggtaaaattacgtttaataaagcaccaattaaaataccaagagatactgctacaacagtgtacaatggtacaccatttctcatgattttagtaaatattttcggcatttcacctttatgagcaagtgtataaatcatacgactcgcactgaaaatacctgagttacatcctgacattgctgcagttaatacaacaaagttaattaatccagctgcaaatgtaataccgattttagcaaatgttgcaacaaacggacttccaatgtctcctaattgattccaaggatacactgaaacaataacaaaaatagcgcctaaatagaaaattaaaattctccagataacaccattcactgctttaacgatatttttctgaggatctttagtttcacctgccgtaatacctatcagttccacaccttggtatgaaccaattacaattgataatgcaaagaagaaaccaacaataccatttggcataaatccgccatttgtccatagattagaaatacctaccgcatggccaccatttccaaaaccaaagaaaataagaccaaaaccagcaataatcattaaaataattgttacaactttaattaaagcaaaccaaaattcaaattctccaaacgcttttaccgagaataaattcgctgccattaataataaaatagcaataacaccaggaatccaagttggcaattccgggaaccaaaacttcatatattctcctactgcgatgacctcactcataccaactacaatccattggaatatattactccatgctgtcatataacctgctgcaggatgtatataatcacttgcaaatgttgcaaatgatcctgttgtagggtttaaataaatcatttcccccattgctctcatgattaaaaataaaaagatacccgcaattaaatatgcaaggataactgatgggcctgtccatttaattgtacttgtcgcacccatgaaaagccccacgccaatcgtaccaccaagtgcaatcatttgaatttgacgggcactcaatcccctttgtagttcattgttctccataacttcttaccccatctctgattgatactaaataaatccataaaaaaacttattgccgtaattatactataaattatcgattttggtacattaatatttgcataccatgcaatcgtttacagaactactatagcaggcttttgcaactttgcaaacaattattttgtgatttttctaaaaaattaaaaaagttgctcaagtaccgttgagtcacatacaacttcagctattcttggtaattatgatataattttaataatattaaaaaggagtatatcaatgttaaaacaaatactgctacgtgctacaaaaatatcggtactctttgctgtagcatttttcatcataaattatatcggtatggaaaaacctgacatcctatatttagttggaagaactattattgcaacacttgctttcatactcatttgtcttacagtatttactattattaattctccagagcgcaagattaaactcggtacgactttaccgattgcattaattattggtatcattttcggcgccatatttttaacggtacaaatcggtgtcatcactgggttaatcatcggtgtgattgctacgtttatttgggaattgattgaaaaaaataaaggaggtcgttcatcatgacaacagcattaattggtgtaattgtattaatcttactaattattagctttgtgccaaactaccgtgctatgaaatcagcaaaagaacaaggaagtaatgcaacaagagctacaattatggtaggcatagatattatcttaattgtacttatcatcgtgacgttattattaaaatatatgtaactatttaaaccaccctatctcatacataaacatgaacgttctaccatttcacatacatatggtcgtccatttaatgaggtaaggtggttttctcgttaaagtttaccttgtaatagtaaaaaatagccaattgttgcgagtattaagtaaatcattgaaccaacaacaaaagatcttacttgcacgcgaaatggtgtctgtttgttaaatataggaccaatcaccaaatttccaacgcctaaaattactggaccagctagaaaaaacaatataatgtaacccatcatgatacgcctcctatttcgtaaagaaacgcgctacaatttgatcgtaatcaatatcttttgctacataatctacattagaaaagtcctgtgcgcttgtcattttattcgtattaacaataacatctaatccagctgcaatcgcggctgttgcaccatttacagaatcttcaatagccaaacattgtgtcggcatataatttaattgttgtactgcagataaatataattcagggtcaggtttaacttgttcaacatcttctctaccaacaactacctctatataatcgtctagacctaatgctttaaaggtgggcattatttccgctttcacactacttgtggcaattgccataggaatgtgacgttgctttaaaaatgccatcaatgatttaatcgtatcaatcatcggtaatgttgtactagtaagatgatgttcttcataaagtttatctttattttccgaaccaatcgctttaattaaatggtcatgcaaatctgtagctgctcctccaatagaagaacgataaaaatcaatgcttataggatcggcattatgcatctctaaatgtttattaataacattaaataaatgttgttccgtatctattattgttccatcgaaatcaaatataactgctctatacatatatttactcctctattttttctctttatcaaagcttaacatagtccgatgaccacttcattctattagtgcaattataacttttttgaccaatactttgctaaaataggccctgttatattatgaatgaaactaaacactgcgcctggtactgctgcaattggattaaaatgcaatgctgctaatgacacagctaaaccagagttctgcattccaacttcaatactgactgctttttgatcttgtcgatctaattttaaaagacgagctaaccaatatccaatcgtataccctaatacgttatgtaaaataactactaaaaatattaataatcctgtagttaagatttggtgcttactgccacctacaactattgctaaaattaatgaaatagcaacaactgatataattggcaaagctgtagaagctttttcagcaattttacgattaataatttgcaaaacaatacctaaagcaattggaattaatacaacttgaacaactgaccacaacatactcacgaaagatacttccaaccattcatttgcaaatagatatattaacgcaggtgtaacgaatggcgctagcaacgtagagaccgtcgtaatagaaacagaaagtgctacgttagctttggctaaataactcattacattacttgatgtcccacccggacaacatccaactaatattacgccaacagcaatatcaggtggtaaatgaaaagactttgcaattataaatgctaatgtgggcataatactgaattgtagacagacaccaataattactgctctaggtgctttaaagaccattttgaaatcattaggtgtaattgttaatcccatacctaacataacaataccaagtaaataaggtacccatttacctaatgtcgcaacatgttgtgggaaaataaatccaataacagctgctactaacatccataccaaaaaactcttcgtggcaaatatactcaatttttgaaacattgttaacacatcctcgtcgataatattgaaaaatattaccataagaccagtaaggttacaattacttttctgaaaattaagattatttagtcattctcttcttattgcaaatattttatcactgataaacaattattttaaacttcattcaaaagtcttagtgaataaagaaaaaagcgtggtaaaatcaacttgaacaaaattaagtcacctttataaatattaaacgtgtatttaatgccatgtattcctcgggaggtcctcacatgttaattgataaattcgaaacatacatcatcaacatcgccggtttaaatgaccgtactactagaaaaaaattaagtaagttatgcaaaagtgtacaattttgtgatgcgttgcaattctcaataaacaaacagtttaatcagtatgtattagaaattagcttaccaaagcaacaacttccatacttcatttcatttttaagttttcatcagtatagtattttccaagtactttcaccaaagaaaataaatgaattacttgattctgataatttatatcaatctgcaaagcgtttcgatatcaatattgatggcttgcaagatgctttcattaaagacaaagtcatcgatattatgaatatgttccaaaatcacactgatatcacttatacgttgaataagtctcatgcacatattatatgtacgccagaaatatttgctaaattgttacatacgattgcaactagaaatatcgacattctatctgccaattatagatcgtcatctatgagcaaagctcgtatatcataataaaagacacatctatacgatgatcatttacaatgattgcgtatagtgatgtgtctttttttgtattatttatcttcggacgattgatcctcaaccatttgttcaaatgcttcacgaacttgtggtactgtcatacctactacaacttggatactcttaccactctttactaatccgtgtgccatttgttgatgcgtgaaatattccgtatctgcaactttactttcatcataaacagttaagcgtaatcttgttgtacagttagtaacatctttgatattttctttgccgcctaaaccgtcgaggtaatatgcagctttgtcttcgtattcattaccagatgaagcacgtttagaatctacgctatcaccttttttatttttgtaatcttgcttagaaaataatttaacttcctcttctgttttcttacgtccaggtaatggaatatcaaatttcaaaattaagaatctgaataagaagaagtaaatcgctacaaatatcagaccgataataacttgtgcaacataagtaccccaatgttctttacctaatggcaaccagtttgttgaaataaagtctaacaagccaccacccatgttacctacaacaccaaatgcgtacattaaagtatccattgatgctgctaaaactgcgtgtaaaacaaataagtatggtgcgatgaataagaatgtaaactctaatggctcagtaatacctacaacgactgctgttaatgtggcaggaataagtagtgccgccacctttttacgattttctttaggtgtcgtagcatacattgctaaagcaatacctaaacatccaaatactttcccatttccttgaagcataaagccataagggaattgctcttttaatggcttagtactcttagcaaactcatttaaatgttgtaaccattcagctttcaagccgtgattgactactactggtccaacttcaattggtgcataaataaagtgatgtaatcctgttggtattaatacacgttctaagaagtgatacaaccatacaccgatatagcctgaagcaatgataaagtgttgcattgaaccaataccgtgctgaacagttggccaaataacacaagtaattgctgctaatggtaacatcacaaaaaatgaaatcgtaactacaaatgttaaaccttggaatacaccaaccatttctggtaatcgtttactatagtatctattgtgaatccaagtaataatagctgaaataataataccacctagaatattcgtatccaatgtggcaatacctgcaattgattttaaaccaggtacattttcaacgcctttttctaaattagcgccaaacgtatgtggccattgtgttaaaatggcatttataaatgtattaaacattaagtaacccatcaatgctgcaagtgctgcatgacctggtgcttttttagctaaagaaagtggtagacctacaacaaatacaacttccatatgcgtaaaaataacccagccaccagattctattactgaccaaaatttaaaccaaaacgtatgttgatctgctaaactccccatgattgtaggatttttaaataatgtcgcaaagccaagcactatcccaaagaaagcgaacattaataccggtacaatcattgcactaccgaaacgctttatcgcattcatcttctattccctccatatcatctttcctaacaatacatctaattagattcatttataaatagatgtcttactatttaaatataatatatagtaaacgcttacacacctacaacgacattgacgtattttgaaagtattttgtataatcagattatcttttcatatagtgaaaattttttcacgaccttatatatgacatcgttgtatttgtaatacattcgttttaaacgcataatcaaacctatatcaatacacaaatatatataatgacatacaagattttaatgtaataacgatctattacacatttattttcaaggaggttgaatatgtttttagatgaacacattaatcgaaactttgataaacttaatgataatgatttacatatcgctcactttatcaatacacatatagatgaatgtaaaaatatgaaaatacaagatttagcgcaattcacacatgcctcgaatgcaaccattcacagatttacacgcaaattaggttttgacggttatagtgattttaaatcgtaccttaaatttgaaagtaataagacacaccaattaccttctaactctatcgatagtttcaaacaagaaatcgatagtacattcagttatttagaacgcgttgattaccagcttcttactaaaaaaatgcatacagcttcaacaatatatttgtatggtacagggcgtgcacagttaaacgttgcttcagaggcacagcgtatattgttaacgttacataatcatgtcattgtacttcatgatgaacatgaacttaaaatgattttgaacaagagtgaacctaatgatttattctttattatttcattatcaggtgaaacacatgaattattagaagtaacaaacttgcttcaacttagacaaaaatactttatttctgttactacaatgaaagataatacccttgctcaaaaagcaaattacaacgtctatgtatccagtaacacattctacttaactgatggtacagactattctagcttcatcagttatcatatattctttgaaacacttgtaagaaaatataatgagtatttactacataatgatatttcaaattagaaaaaaggaagttatgatttaatggccttgagcctatcataacttccttttatcattttattgttgtgttgatgtttcgataacgtggtacatcttatcaaacatcaattcgaaaccatgcaccatggcatcatgatattcttttttcttttgcttgtattctaaattagtaaatcgtctttctttttcaactaatgaacgataataaaatagcatttgggtgccacctgtttcacgttcaaaaaattctacctcaatgacatcttgcgtttcacttagtccaggcataccgatagtcatcttaacgtattcatccataactaaagattcataaatgccttcaatcacatttactttgccattacgttgttgatctacaatacgatatttaccgccttctttaacgtccgcttcaatctctttattcgttctggctgatgtcataaaccattgtttcaacaaatctttctttgtccaagcttcgtatactaactctggagaaaatttataaagcttttcaatttcaacttcgacatgttcattctctacattaaattttgccactgttgtccacccactttcgctcttacttttattttaacgtatttttgctcagttccaaacatagatgatcatcatttttaaaagattagcgttatacggtgagtacaacatgatctgttaatataacaagccaccttacttggctacatcgatatattgttaagcattaatgtttcatttcttgactagtgttcttttttagctttggaaaattaaataaaatcgcaataagtccgcatacacctaataatataggataaatgctgtatgggaataacattaacggtgaaataccagctacaccagccgctgaaatgacttgcgggctatatggtaataaaccttggaagcagcctccaaatatatcaagaatacttgctgatttccttgaatctacatcatattcatctgcaatatttttagctaaaggacctgacataataatagagatggtgttgtttgccgtggcaatatctgcgacacttaccaaactagcaattcctaattctgcgccacgctttgatttcactttagagcgaacaaattgcaacaaccattcaataccaccattgtgttgaataataccgactaaaccaccaattagcaacgcaatcatagcaatatcttccatgcttataatacctttggacactgcatctagtagccccatccaaccgaatgaaccatctatgagaccaatgattccggctaataatgttccgccaatcaatacgataatgacatttacacctaataatgctaataccaatactaagatatacggtacaactttaattagattataatcatagtttttagcatgatttaaagaaatgccattcgttaagaaatacagaataataatcgttaaaatagcacctggcaatacaattttaaagtttactctgaatttatctttcattttcgtatgttgtgttctaaccgcagcaattgttgtatctgaaatcattgatagattatcgccgaacattgcacctccaacaactgtagccattgctagcgcagttggtacatctgtcgcttgtgcaaatccgtaaccaacaggtgctattgcagcaacagttcctacagacgtccccatagatatagaaacaaacatacaaatcacaaacaatcctacaataattaaattttctgggattaatgatagtcctaaattaactgtcgactttacgccacccattttttcagctgtatttgaaaatgcacctgctaaaataaaaatcaacatcattaaaacaatgtttgaatggcctgcacctttcgtgaagacctcaacttttttagcaaatgattcttttcgattcattaataacgccacaattaccgttatcgtaattgcaacatttaatggcattgaagtaaaatcacctgtgataatacctacgcctaaaaacaacgccacaaataataacaaggggaataatgcccaagcattgctctttttatgtacttccatcctttttacctgctttccaattaaaaatacctctttctcacaaacgatgaagaaagaggttttcatgtgctttacctgcttatcttcaaaccattacggttactggaattggcacattcgagatgttgccgaggcttcatagggccagtccctccacctctctagataagtgatgcttatttacgtttacgttacaagataatccttagtacgtcaatcataaattaatcaggagtcgtataatatttttcataaacaatcattgctactgtaataataatcaaaacaataatgctaataacaagtaaaagccaccatttaagcattaatgcaataaaaatgaacacgatagacacacttactaatattaatgatatgactttaaattgctgaacacgttgcttggagatgactttcaactgtttgtttgatagacgcgtattttttatactgattcccagtatattttctaatatttgaaccaatacgatacttattgcaaatataataattggtaaaacatcatagctccctatagttaatgtataaattacaaatccaatgtaaagtaaccctgagacaaaggataaaaagtatgcgacgtatttgttaaacttaatgatatgctttttaacgttttgatgtgtaaaccatacattcgaaacgatcgcaactgctacaaataatgtgaatactatatataatggtaatttttgttcaggaaaaacagtcgctattccaaaagctaatgctaaaatcaaaaataatatagctctagatactattaatgccataataacaacccctttgtttaatatcgagtttgcaaatttacgtttatcagcgtttctatgatcagtacttctacgggtagcgtttctatgtaatttacatcatcttaacatataaatacttcgctatttaattgaaaacatatcctattattctttgtccgttctgacgtttaatatctagccttaggcatttcacttgttaatgaatttaactttcttccactaaccgtccctaaacccaatcccgcaacagtttttaactttttcgttgttgtcctgacatcctcattaagaaagtttattctgcttaaaacttataatccacaccctgagcaaacgctccttatgacagagtattaaaataagccgataaagatacacacctttaccgactatttaaaatacacttcaccaattcattttaatttaatggattgaagtaactaaattaatattatgttgttcaattaaaagcttcatacaaacctaatctatttgcactccaccgctaacaccgaacacttgtccggttgtataacttgattcttctgacgctaatagcacataagttccacataactcaacaggttgacctgcacgacctaaaggtgttttttgaccaaatgttgggattttactttgaggttgtccaccagaaatttgtaatggtgaccagaatggaccaggcgctacacagttcactctaattccttttggtcctaattcttctgaaaaacttttagttaatgaaataattgctgcttttgaagcggcataatcatgaagaataggactaggattataaccttgtacagatgatgtcgttgtaattgacgcacccggttttaaatattccaatgctttttgaactgtccaaaatagcggatagacattcgtttcaaatgtttctgtaaatgcctcagttgtaaatccatgaatatcatcatgatactgttgatgtccagcaactaaagtaacattatctaagccacctaattgttgatatgcttgttcaacaaggtcatagttgaactgttcatctcttatatcaccaggaattaacactgccttttgaccactttcttcaatcacttggcgtacttcttgtgcatcttgttcttcactcggaagatagttaatcgctacatctgcaccttctttagcatacgcaattgctgctgcacgccctattgctgagtcaccacctgtgactaatattttatagccttgtaagcgttgatgaccttggtaagacgtttcgccacaatcgggtgctggcgtcatttcagattgtaaacccggtacctcttgttcttgtttttcataatccgttgttttaaattttgttctaggatcttgagctgccatttttttacatctccttattcgcttaatggttattatttacccaatcttcctaggaacttaatcatgattacactaaaaattactttcttctttataaaaacaagctcgaattattcatgcaatagtctctttacaaattcaacaaaaaactcaggtactttttccagaatcctttcatccggtttatattgaggatgatgtaaatcatattcactatgagaaccaattaacgcaaatacacttggaaaatgttgactataacctgaaaaatcttctccaatcgtaagcggctgttccatcattcccaccttatatccaacatgttgggctactgcaattgctttatgcgtcaatgcctcatcattcatcacagcgccaggtaaatgcgtataatttaaattaattttcatattatatgcttgagccaatccgtccgcaatatcttgtaatcgtgtttctacaagctttcgtaccacaggatcaaaactacgcactgtgccttgtacatacgcatgatcagcaatgacattccaagtattaccacatgatatttgtccaattgttactaccgcttcatcaaacgcagatagatttctactaactatggattgaatactattaatcaattgcgccaacacaataactggatcgttgcattgttctggctttgcagcatgaccacccacgcctttaatatgaaactcaaaacgatctactgctgatgtaattgcccctgttttgattgcaaatgtacctaccgaacgcgatgggtcattatgaaaacccaatactgcttgtacatcttttaatgcatgtgtttcaataattttaaaagcgccatgtcctagttcttctgctgattgaaaaatgaatttaacacgcccagtaagagtgccctcaatttcttttaattttacagctgtagccaaaatactagccatgtgaatatcatgaccacacgcatgcataacaccttcattttcagatttaaaatcctgttcaacaagctcttgaatcggtaaagcatcaatgtcagcccgaacagctatacaactcagaccttgtcccacttcagcaacaagcccagtcgcaagtggtaagtctaatattctaatatgatgttctgttaaaatatctttaattttttgtgtagtcttaaattctttatcggatagttctggaaattgatgaaaataccttctccaggtaacagcttgatcttttaatcccatcggtcattccccttccttaagtcaatgatatgttgtctaccctacgatgatcatctttgactattaaacgatgatttcacaacaatgtactcttgttaattgctttcgttaatgatagacagttgtttaataatatcgtaacactgttgtcaaactattctaacttttataattgagactctatacaaaaacgtgttctcgaatatacttgtttttacaaaccacaaaaagctctaaacattagtttaaaccaatgcttagagctttctaattattttatgctttaaaagatactgtgttatctacgatgaccttaccgtctttaataactttttctgcgtgattgataccaaaatgatatggaatatattcatgatttggtgcatcccaaattactaaattagccttatcacctgtgttaattgtacccgcgttaatgtctattgctttagcagcattgaccgtaacagcattccaaacttcattaggtgatagctttaatttcaaggctgcaatcgccataacaagttgtaagttgtttgtgacactactaccagggttataatcagttgctaatgcaatcgcaccgttattgtcaagcatgcctcttgcatctgcataatcttctttacctaaatagaacgtcgttgcaggtaagaggacagctacagtatcactatttcgcaacttttcttttcctttatcactagaagctactaagtggtctgctgatattgcttgttcatcaattgctaattccagtccgcctaacggatcaatttcatccgcatgtattttcactttaaaacctgcttctttggctttttgcatataatgttgcgattgttctattgtaaatacacctgtttcacagaaaatatccgcaaagtctgcatattgttttacttccggaagtaacgcaatcatttcttctaaaaatgcctcatttgaacttgcctctttaggtacagcatgaggccctaggaaagtatgtttcatgtctaaatcatatttctcagctaaacgattagacactttcaattgcttcagttcattttctctatctaatccataaccactcttactttcaactgcaagcacgccgtgtttaatcatagtaagcaaatcatgctctgcttttttaaacaagtcatcttcggatgtttctctagtagcattaacggtagataatatgccaccacccatttctaatatttcaaggtaagacttaccttgacgttttaatgacatctcatgttctcgagatccaccaaatgttaaatgggtatgtgcatctactaatgctggggacactaccttcccactagcatcaatcgtctcaatcgcatcgtagtcatctgtatgtgttccagcatatacaattttgccatctttaatgacaactgtaccatttttcacaacatttaattcatctaattccttacccttcaaaggtttatctgttgatctcggtaaaattaattctgctatatgattaattattaaatcattcattacttatcacctgctttatcaatcattggaatatgaatacctttttctttagctgtttgaatagcgatgtcatagccagcatcaacatgtcgggcaacacccatacctgggtcagtcgtcaatacacgttccaatcttctttcagcacgctctgatccatctgctacaacaaccatacccgcatgaagtgaatatcccatgccaacaccgccaccgtgatggaatgaaatccatgaaccacctgcagctgtgttaatgagtgcattcaatacagcccaatcaccaaccgcgtcactaccatctttcatactttctgtttcacggttaggactagcaactgaaccagcatctaaatggtctcgtccaataacaattggtgctgaaatttcaccgtcacgtacaagacgatttaaagctaagcccattttcgctctttctccatagcctaaccaagcaatacgtgatggtagtccttgatatgaaattttttcttcagctaaatcaagccatcttaataacttttcattttctgggaaaagtttgcgcatttcttcatccgcacgctcgatatcttttggatcaccactcaacgcagcaaagcggaatggccctttaccttcacagaataatggtctaatgtaagctggtacaaagcctgggaagtcaaaagcatttttcactccgttattgaaggctacttgacgaatattgttaccataatcaaatgctacagcgccacgtttttggaattcaagcattaattcaacatgctttgccattgaagcttgtgacagttcaacatattttttcggatctttttcacgcaatactttcgcttcttctacagagtatccttgtggcacatatccatttagcggatcatgtgcacttgtttggtcagtaataatgtcaattttaaatcctttttctagaatcgcttgatggatgtctacagcatttccaactaacccgattgataatccttctccacgttctttcgcctcttctgctaattttaatgcttcatctaaatcagctgttttaacatcacagtatttcgtatcaattcgcttatcaacacgtgtttcatcaacatccacgcaaattgctaccccatgattcatagtaattgctaacggttgcgcaccacccataccacctaaacctgctgtcagtgtaacagtgcctgctaaatctccattaaagtgttgattacctagctcggcaaatgtctcataagtaccttgcacaataccttgagaaccaatatatatccaactaccggctgtcatctgtccatacatgattaaaccttttttatctaattcattaaaatgatcccagtttgcccattcaggcactaatactgaatttgaaattaatacacgtggcgcttcttcatgtgttttaaatacagcaactggctttcctgattgtactaacattgtctcatctgattctaattctcgtaacgttttctctattgcttcaaaagcttcccaattacgtgctgcttttccaataccaccataaacaactaaatcttctggtctttcagcaacttctgggtctaaattgttgtataacattctaagtactgcttcttgttcccaacctttacactcaatactcaaacctttttttgcttgaatttttctcataaaattcgctcctgttcttttaagaagttaattccactaaatttaaaacgcttacattattatcttcaatattcattatagtatgttaaaatatagccaacaaatataaataaactaattatccatagcttgaatctataaataaaaggagcaaaacacatgaaaattattcagttagaatacttcttggctatcgtgaaatataatagttttactaaagctgcacaatttttacatattagccagccatctttaactgctacgattaaaaaaatggaagcagatttaggttatgacttatttacacgttcaacaaaagacatcaagattaccgaaaaaggaatacagttttatcgttatgcgagcgaattagttcaacaatatcgatccacgatggaaaaaatgtatgatttaagcgttacatcagaaccaaggataaaaattgggactcttgaatctacgaatcaatggattgcgaatttaattcgaaagcaccattccgactaccctgaacagcaatatcgtttatatgaaatacatgataaacatcaatctatagagcaattactgaattttaatattcatttagctataacaaatgaaaaaataacccacgaagatataagatccattcctttatatgaggaatcttacattttattagcacccaaggaaacatttaaaaatcaaaattgggtagatgttgaaaatttgccactcatattaccaaacaaaaattctcaagtgcgcaaacacttagatgactattttaatagaagaaatattcgtccaaatgtcgttgtagaaacagatcgattcgaatcagcagttggatttgttcatctcggcttaggttacgctatcattccgagattttattaccaatcatttcacacgtctaatttagaatataaaaaaattcgtccaaacttaggccgaaaaatttatatcaattaccataaaaaacgcaaacactccgaacaagtacatacattcgtacaacaatgccaagattatttatatggacttttagaggctctttaacttaagttattagagcctcttatgcagttgctcagtcaactgtataccttttgcctttaacttaagttattagagcctcttatgcagttgctcagtcaactgtataccttttgcctttaacttaagttattagagcctcttatgcagttgctcagtcaactgtatacctttttcctttaacttaagttattagagcctcttatgcagttgctcagtcaactgtataccttttgcctttaacttaagttattagtgcctcttatgtagttgcgtagtcaactgtataccttttgcctttaacttaagttattagagcctcttatgcagttgcgcagatcatcgtataaaaattaatgacgtcatttcaaaaatcgatacaaaaataatttattataaaaattctaagaaagaagtgaagcagatgttaaaatctattaatcatatatgcttttcagtcagaaatttaaacgattcaatacatttttatagagatattttacttgggaaattgctattgactggtaaaaaaactgcttattttgagcttgcaggcctatggattgctttaaatgaagaaaaagatataccacgtaatgaaattcacttttcatatacacatatagctttcactatagatgacagcgaatttaaatattggcatcagaggttaaaagataataacgtgaatattttagaaggaagagttagagatattagagatagacaatcaatttactttaccgaccctgatggtcataagctagaattacatactggcacacttgagaacagattaaattattataaagaggctaaaccacatatgacattttacaaataaggtgtcattataaaaaggcctcttgaactccgttaaaattttaattaattattatataataagagaacttttcaaacaatacagttgttatttttgctatttcaacaaacataaataagcagtaagatgactacaacttaagagtcttcttactgcaattatttttcaaatatatcaacgttaatataacttctattaagaaatactcacattctgccctgcaatgcaaatctcgtcacatataaatatttttaattattttaaaaaatgatgcactaaattagcaacgagcttagcagttctattgtcagcgtcatatgttggattcatctcagcaatactaactgaagacaccttatcacttggaataatacgttttgctaattcaagaacagtatgtggatacaaacctaacactgccggcgcacttaccccaggcgcaaacgcactatcaatgacatccatacaaatcgtaaacataatgacatcatgttcatgtacaaaacgttcaatcatatctttaattgttggtgatacgtgactcaataattcatctgcaaagacataatcaatctttttctctttagcataatcaaataaactttgcgtattaccaccttgagcaataccaagcactaaataatctgtgttttcatcttcttctaaaatttgtctaaagctcgttccagatgtagattgttgttcagcacgtgtatcaaaatgcgcatcaatatttatcacaccaatagattgtgttggatagactttacgtgttgctaaatattgagcatacgcaatatcatgtccaccacctaataaaaatgtttgtctatgattagcaattgacttcgctgcaagcatagcaaattctttttgagtatcaattaattcctcatgatcatgataaacatttccgtaatcgactaaagtttcacattgattcaaatccggcaaacctgcaaatgcttgtttaatcgcatctggtccttcttttgcaccaatgcgccccttgtttaaagcaacacctttgtcaacagcatagcctaatataccgacccctgatggcatactactcttttccagcttagacaaatcttcaaatgttactgtttgaaaatgtctaaattttttcgggtctgtttcactatctaaccttccagtccataaatttggttcaccttgcttgtacacagcatttccccctcttatttatgtggcttattaacaattaaagtataacgtataggaaattttgaattcaattcatagttaaatccgtatcttaaaaatacttatctacattacttttacccctattttctatgtaataacgaatacttagctgatttatgttaataaaatacgtcaagactattacattttcattaatattgacatagacaatttatctctcggcttgtaatatgtataattgttactaaaagatattttgcttgttacctaatggaggttacatataatgaagaacaataaaatttctggttttcaatgggcaatgacgattttcgtcttctttgtcattacaatggcgttatccattatgctcagagatttccagtctataattggtgtcaaacactttatatttgaagttacagatctagcaccattaattgctgcaatcatttgtatactcgttttcaaatataaaaaggtccaacttgcaggtttaaaattctcaatcagcctgaaagtaattgaacgtctattgctagctttaattttacctttaattattctaattattggtatgtacagctttaatacatttgcagatagctttattttattacaatcaacaggcttatcagtacctattacacacattctgattggacatattctgatggcgttcgtagtagaattcggattccgttcatacttacaaaatattgttgaaacgaaaatgaacacgttctttgcaagtattgttgttggtttgatgtattcagttttctcagcaaatacaacttatggtacagaatttgctgcttataacttcctttatacattctcattctctatgattcttggtgaattaattagagcgactaaaggacgtacaatttatattgcaacgacattccatgcttcaatgacattcggacttattttcttgtttagcgaagaaatcggcgatctattttcaatcaaagtcatcgccatttcaacagcaatcgttgcagtaggatacattggtttaagcttaattatccgaggtattgcatatttaacaacaagacgaaaccttgaagaacttgagcctaataattatttagaccatgtcaatgacgatgaagaaactaatcatactgaggctgaaaaatcttcttcaaatattaaagatgctgaaaaaacaggtgtagctactgcatcaacggttggtgttgctaaaaatgatactgaaaatacagtggctgacgaaccaagcattcatgaaggtactgaaaaaacagaacctcaacatcacataggtaatcaaactgaatctaatcatgatgaagatcatgacatcacttcggagtcagtagaatcagcagaatcagttaaacaagcaccacaaagtgacgatttaacaaacgattcaaatgaagatgaaatagagcaatcattaaaagaacctgcgacttataaagaagacagacgttcatcagttgtaattgatgcagaaaaacatatcgaaaaaactgaagaacaatcttcagataaaaacaaataataacaaagcgcttgctagtacctcttaaaaagatgatgctagcaagcgcttttctatactatatattatttttctaaaattttaacaccctcttgagtgcctacaataacttgatctgccatatctaagaagtatcctgtctcaaacacacctgtcagatgaattaaatactcatggaacttatatgggtcaattccttttggtaacttacaatctaaaatataattgccattatcagttataaatgcgacatcttcgtttacacgacgttctacttttatatcagcgtatgattcaattttacgtaatatgtgataccagttaaatttatccacctctactggtaacttaaacgtctcacctaagtattgaactattttcgtttcatcgacaaccacaacaaaacgcgatgccatttcatctataactttctctctgaacagcgcaccaccgccacctttaattatatttaaagatggatctacttcatcagcaccatcaattgctaagtcgatatgatcaacatcattgatttcacatattttaatacctaattcttttgctaaaaatgcaattttattagaagtgcatacacctgtaatattgtaaccacgttctttaattagttgcgccatttgaggtaagagtaattccattgtacttcctgtaccaattcccagcgtcatgtcaccattgatttgacttaaaacatcatttaatgtcattaacttgagtgctttgacatctttcatgaaggtagcctcccatatttatgtaatctattcaattcatattttacatgactcgtataaattaacatacccttatttctaacatttttttaaacatatcaatcagaatttacaattctaaaaatgttttatagtacaatatattttaaataatactcgttaaggagaatgatatgatatcaattcacgcaatttcgacaggaaaaatccaagatttgccttatagctcgaaaagaccgatgcgctctgctttagataaaactaagatttcacaaacaacatggttatcttcaactggtttcactggtgatgaacaggcttataaagatcatggtggaccacataaagcagtttgtgggtttagtaagcataattatgcactgtatcaagatgatttacctacactacctactcatgcgatgtttggagagaatttaacatttgattatttagacgaatctgatgtttactttggtaatcaatatcgtttaggtgaagcgttaattgaggtttctgaaattagagaaccatactggaaaattcaagcaaaatataatattcctgatttagtgaagcgcatgtctacatctggtaaaacaggtttctatttccgggtattaaaacaaggctatgtatctccaaatgatcagctttacttaatacaagaagcaccaatcgaacatcgtttatctgtacaacagcttaatgacctttattataatgatagacaaaatcaagatatgttacgatatgcactaaacaatccatttctgtcaccaacaagacgcgataaacttcaaaaaatgtataacagaacattgaaataattacctttcattataagtgttaaatgaacttttcaaaacaaaaaggaatcaacttacacatcgtttgtataatagtcttatctataaccactgatgctattgattccttttttatgttatatattttctttatttcaaactgtatattaatgatgtcacttcatttgatacgattcttgataacctattcaaaattccgccaaataacataaatattatataaatgccgatacttttaatcattttctactttttcttcgatacggaaacttgttttcgaattgaacacttcaccagcttttaaaattgacggtgctttttcaccatataaattaatatcatttggtaaaaattgtgtttctaatgtaaagccagaatgtggtttataaatattaaatggactatcccactcatcaggctggttaaaagtaaagaacacaacatgaggcatatctgtatcgacctctaacataaattcatgattttcaacatacattttatgttcaccaactgtaaatgggtgatcgagaccaccaaaacgtgtcatttgttggcttaattgcgcatgttgtgatgtaaaaatatcactcaattttatcttgttatcttcaaacacttcatgtaaatctagaatatcacctgtaacaatatttcgctcatctaatacatacatatctaattgattacttgaaatgcgatgattatcaacgacattattatctcgattcaaattgaagtacacatgattcgtaggactaaacaatgtgtcttctgatgcaactgcttcgtattcaatcgaccattggtgatccgcatcataaatatgtgtaatcgtcacatcgatatcacccgggaaatgatcatcagctgatttcaacaccgtcttaaatataactttaatttgagcaatttcatttctaatttcataatcaaataacttattgtccaaaccatgacatccaccatgtaaatgatgttcaccgttgtttttttctaactgatattctttacctttcaacttaaatttagcattatcaattctaccgctatatcttcctatagaagcaccaaatttaaaaggattactatgataaaattcatccgcttcaacaacatttccaagaacaatattattatcatgatatttccaagacactactcttgctccataattcgtaaaaataattttagtttcatcattatcaattttgattaaatctacaccttgtctttggtgctcaacttcaactatcatttttacttctcccttctaaccacaagtgttcaagctctgctgggtagcaacattactaaaacacctacaatacaaatgattgcaccgataacatcatatttatctggcatttgtttatctacgaccatcgcaaaaatcaaactcatgatgataaatacgccaccatatgctgcatatactcttccgaatgatggaaatgattgaaatgtcgcaatgacaccatataacatgagtatcgcaccgcctattagcccaacaagtgaagactgtccttccctaagccacagccaaatcaggtatcccccacctatttcacataagccagctaatataaatataaaaatcggatataacatgaaatcactccatcacacatttgctatcaataatctatcggctacatatcatttgtttacatttcttcttacttcacattcccattttaaaaagttcgttttcacattcatattgtacacttttttagacattattctatagctaaatataaaaaaataagagtaacacgctttcatcatcattttatatgataaatgtgtgtcactctcatcaattttattttttaaatacacgtttcattgaattaaataagccacgttcaaatgtaagtactgaatctttatatgttttaattgcaatccatatcaagacagctaccattacaattgagattaaagaacttaagatgacctcatatatttgaagccctgaagtttgagcgcgtacaactaattgaaatggcgctaaaaacggaatataacttgtgattaaagcaagttgtccatcaggattatttatcgtgaatatcgcgatataaaatgcaatcataccaagtaatgtcagtggcatcaaagattgatttaaatcttctattctagatgttaatgatccgaggatggctgcaagtaatacatacgccgtaattccaacaatactacttataattccgacaataataatttgccaagacaattgattcatttccacgttaaaaccttgtagcaagtcttttaagtcaaaggcaaaaatgcatataactgccatcaatacaattaaaataatctgagtcacggcaactgctataacgcctaaaattttagcaaaaatatgttggattggtgaaatacttgtaataatcatttcaatgacacgcgatgttttctcactagcaatttccatagctatttgagatgcataatttaaaacaatgaagaacattagaaagataatgccataagctaaagcatagttgaaaatcttttgtccttctgatactttatcgacttcatcattagaaatcaccttattatcaactttactttgtgcttgtaatttttgtaagtcttctttgttgatatttaattccccggctaccatatttgtttgaatagctgtaagcagtgcttgtactttttgtgaatcttcatgacttactcgcttctcactaatgattgtcccttgtaacgtgcgattttgattcaccttgataatataagctttatcaagtttatgtttttttacttctttttcagcatcttctatagaaactttagtaaacttagcatcactatgaaatgtattcgcctgttgcttgaaaaccttatagatttgttcattcggtgctgctacaccaattttatctggaccatcatcaaacatgttaataatcttatcaatgttagataggccaatcattaaggcagcaataataatcataaaaattacaaatgatttagctttaatttttttgatatatgtcaaagtaaatgtcgcccaaaacttatgcatccttgccaccaaccttctcaatgaatatatcttgtaatgatggttctacaacttggaatcgtttaacataaccttgatgtgccacaacttgataaatatctttggctacgtcttcattctcaatcgtcaactgaagaccttgcttcatgttttcactatgaatgatgcctctaatgtttgttaaatctggtagtgttgtttctgattcaatgacaactttcttgttaccattagatgcacgtacatgattgatatcaccagaaacaacaagttgacctttatctaaaatacaaacatcatcacataattcttcaacatgctccatacggtgagaactataaacgattgtactgccccaatcatttaagtctttaactgcttcttttaataactcaacattaactgggtctagaccactgaaaggctcatctaatattagtaattctggtttatgtaacatacttgctaacagctgaattttttgttgattcccttttgatagactatcaattcgttttttgcggttttcagtaatatcaaaacgctcaagccaatacgatatttgctgttgtatttctgtttttgacattccctttaaagttgccaaatatttcaattcttcttcaactgtcaatttcccatgtaaaccgcgttcttccggtaaataaccaatacgattgtacattgttttatctagttttttaccgttatacgtaatgtgtccttcagttagttcacttaagcctaaaatcatacgaaatgtcgttgttttacctgcaccatttcttcctagaaaacctaacattttacctgattctaactttaatgaaatatcatttactgccgtcatcttgccaaaacgtttcgtaacatgttcaattacaagtcccatactttgcctcctaaaaaaatatgtatttatcttaatataacatttccattctctataaatgcaatatttttaaaatgaatttatttttaaaatttctgaaattgaaaaatttaaatagtgccatttttgcatgttaagtatcattagcactagatatgttttttccatgcctttattgccttatttgtaaaaaaatatcccagcatcattgtgccgagatatttatatcattacaattgattatctgtttcttccggtgttttcggtgtttcagatgtacacgctttttccggtgtttcagatgtcactggttgatttttaattgtagacgggtattttgggctttcgccatatttatttgccggcttactgtcaaagcataggaatactatcataacaattgttaggcctaaataaacaaaataaagaagtactaacaaaatattaagacccatcggcattaatgtaaaatcactgtcataataactatcgataatctgtaatactatataaaatataatactgaatactgtcataatcattggaaataacattgttcttgatatatcgtgaaatcttcgaacgcacaacgctaaatttggaataaacgttgccaaactatagacaaaagtatacacagatgtaaggataatcatcaatatactcataactattaatgtttcgttatccgccgctatagaaataaagaatagaaataggtttattattagcacacacacagctggaaccataagtatcaaatgccatagtgccatataccaatattcactacgtcttgatctccccttaaaatttacataatttttccaaaataaaacgaatgatttcataaaacctacttgaggtaattgttccattgtaatctccctttcgttaatcatatttatatttttaattattgttaccgttataatttacaagattcattatcaagccacttcatttcaatcgtcaatcactttggaaaatgaactttatatttcatcactagtaaaatgaaaacccgctacaagtacacatctatatggagactcatttgaaagtcaacgcttcgttaactatactaaaaatatgtcatactgcaatgttcacgtttaaaagagtctcaatctatgcaaataaaatattccataacaaagtatatactttacatttttataattcttaacaatactattttatcaaacatttaccacaataaaaatatctttttcatttttatttaaattaatcatataattgcgaggagaatattatggatttcgttaataatgatacaagacaaattgctaaaaacttattaggtgtcaaagtgatttatcaggataccactcaaacgtatacaggctacatcgtggaaacggaagcttacttaggtttgaatgatcgtgcggctcatggctatggcggtaaaataacacctaaagtcacgtcattatataaacgtggtggtacaatttatgcacatgtcatgcatacgcatttactcattaattttgtaacaaaatctgaaggtatacctgaaggcgtacttatccgcgcaattgaaccagaagaaggtttatccgctatgttccgtaacagaggtaagaaaggctacgaggtaacgaatggcccaggaaaatggactaaggcatttaacattccacgggctatcgatggcgctacgttaaatgactgtagattgtctattgatactaagaatcgtaaatatcctaaagatattattgctagtccacgaatcggtattccaaataaaggtgattggacacataaatctttacgttacacagtgaaaggtaatccatttgtgtctcgcatgcgtaaatcagattgtatgtttcccgaagatacttggaaataaatgccatctttcattgattactatcatgaaaatgaaatctatctccttataagtcaatcaatcgtgccgtcaacatgcggatgggttgattgtttttctttgtatccatcatattttttgattcatctcctcttattgaacttgttcttaattataaaatataacaatagaattatttataattattaaatttagatgcattaatattattgatattattttcaaaaactagaaatattgatttgttgcatgtataatgttaaaagcgcccttttataacgcttacatataaaagcttatttagggagagggatattcaacaagggggatttgaaaatgatagaacttaatgcaattacaacattatgtttagcttgtatcctttatttacttggtaaggctatcgttaatcacgttaattttttaaaacgtatttgtataccagcaccagtgattggcggcttaatctttgctattttagttgcggctttggattcatttggcatggttaagattaaattagatgcttcattcattcaagatttcttcatgttagcattctttacgacaatcggtcttggtgcatcattgaaattatttaaattaggtggcaaagtcttgctattatactttatgttttgtgctatcatttcagtcattcaaaacatagttggtgtatcactagcaaaagtattaaatattaaacctttgttaggattaacagcaggttccatgtctatggaaggcggtcatggtaatgctgctgcttatggtaagacaattcaagatttaggtattgattcggcactgacagcggctcttgcagctgcaactttaggtcttgtatttggagggcttatcggtggtccagttgtaaaatttttaatcaaacgttataacttaaagcctcaacatagtgacgatacatttaaagattatagccaagtagcatataacgaacatttacatagtaaatttaatgccactgaagtattcttcattcaatttacaatcgttgtattctgtatggcagttggaagttatttcagtcatttgtttacagctcaaacagggattaatgttccaatttacgttggctcattatttgtagctgttattgtccgaaatatctctgaaagttttaattttaatattgtagatttaaaaattactaatcaaattggcgatgtcgcattaggtattttcttatctcttgcgctaatgagcattcaattaatcgaaatttataaacttgctatacctcttattattatcgttttagttcaagttgtcgttatgattttatttgctgttttaattttatttagaggtttaggaaaagattatgatgctgcagtaatggtaggtggttttatcggtcatgggcttggtgcaacgccaaatgccatggcaaatttagatgttattactaaaaaatatggaaactcacctaaagcatatttagttgtacctattgttggtgcattcttaatcgatttaattggtgttatagtcattatgggattcatacaatggtttagttaaacaccaaactcataaataaaagaggaggccttcgcctcctcttttatttatcctcgatgtatattcaagttacgttgttctatccatgacaatatttccggactaaatacgatttgtttttgtgttaagtcgtcaatatttttagcatctaacatcgtcattattgatttcatgtgttcaataaatgattctacataagctactgtatgtgcaatgccattattttcaacttgatttaaaaacggacgtgacataccagttgcctttgcaccaagtgctaaacttttaattgcatcgagtggtgtacgtaaaccaccactcgcgaaaactgaaatttcgctttgataagccgttgtttcaagtaatgactcaactgtagactgtccccatgatgataagtaatccatatctttatttgcacgacgttcattttcaatatctacaaagttagtaccacctttgccactaacatcgacatacttgacgcctatttgttgtaagtcatgcattaattctttgctcataccaaatccaacttcttttataatgactggaacagacactcgtgatacaatcgacgctatattatctaaccaagtcacaaattcacgattcccttcaggcataactaattcttgaggagaattaacatggatttgtaacgcttgtgcctcaagtaattcaactgcttccaaagccttttctactggtacgtccgcaccaacattgctaaaaatcatgccttcaggattcatttttcgcgcaatcgtaaacgtctcagccatgcgtggatttctcaatgccgcatgtgttgatccaactgccatcgctaagccagtttctcttgcaactacagctagcttttcattgatgtttttcgtccactcgctaccacccgtcattgcattaatataaaccggatatgccatcgttaagtcaggcgtctgtgatgtcaaatcgatatcatttacattaattgatgggatagaatgatgcacaaaacgcatcttatcaaaatctgaatgcattgcgtcagattgggccattgctatttcaacatgttcattttttctctgttctctttgaaaatcactcatgattaaacctaccttttcgtcatttctaatttaaaaccattttttacgtctgaaaaagatgattaatacgacagctataacaaacattacagctaagcaaatataatatccataatgtaaatgtaatgccggcatatttacaaagttcataccataaatcccagctatgaatgttaacggtgaaaatataactgatactaatgtcagtacttgcataatactattcattctaaatgacgtgtatgactcaaaattttctcgtatttcgtttgtcatttcttgagcagtacgaatgatattacgttgcttaatcaagtggtcatcgatatgttgaatgtatagcgaatgtttattatctataatcaaatcaccattttgtttcattgtatcaattagctcttgcataggaaacagtacacgttttactttaatcaaatccgaacgtaacttaaagacactatccatgaccattttattaaagcgatcatctacatggcggtcttcaaaatgataaacactatcttcaagtgcatatacaaagttgaaatatttatcaaccatcatatctaaaattaatatgacgacatctgcacaatctaattctgcatctaatgtattcatatacttatagactactttatttaatgattccaacgtttgatgatgatatgttactaatacattgtcttgtataaaaatatttagtgctattggtgaatagtttgaccccataatactatggaatactaagtattgataatctttataagatttatatttagctcgtggcataccgttaattgcatcatccacttctaaatcattaaaattaaaatgtgctttaaaccattcattttcttgttcattcggttcatcaaaatcataccaaacaatagtcgcatcttttggtatctctttgatatcatcaactactttaaacggttcatatgtagtttgataccgtatctttaaagccatcgatactccccctaaataacgaattctctattattttatcatgaattaaataacgtgtatgtcttaatttattttagtatgatagtcactaaggagatggttattatcaaacaactttttacacatactcaaaccgtaacatctgaattcattgaccataacaatcatatgcatgatgcaaattataatatcatttttagtgacgtcgtgaatcgttttaattacagccacggtctttctttaaaagaacgcgaaaatttagcatatacgctatttacactagaagaacatacgacatacctctcagaattgtctcttggcgatgtatttactgttactttatatatttatgattacgattataagcggttgcatttatttttaacattaactaaagaagatggtacactagcatcaacaaatgaagtaatgatgatgggaattaatcagcacacacgtcgttctgatgcttttcctgaatcattttcaacacaaatagcacactattataaaaatcaatcaactatcacttggcctgaacaattaggacataaaatagcaattccacacaaaggagcattaaaatgacagatgcattacaacaaaagattcatatcgaattactagatttattagatgatgttaagtttgaattaacagaattaaatgcacaaaaagggttatacattaacggaccagcaaatcagctacttaagcgtggcgtgcatatggcttatgttcaaggacaaaagcaagccatcgataatattatgactattgtggaacaacagcttgaagatcaacatttcctagaacattatgataaatttcaaaatgaggttgctcatcgcaattatgataaaacagctaactttgcagaacttagtgatattccacgtcaattcgataattttttagatcaattttatcaaattaaagggcaatactttatcatcacacatatcaatacacttattggtgattttcactcagaagctcattaacaattagtctatataacccttgctatattttcaaaaacaaaacccaattacgttttcatgtcaaatatcatcttgcatgaaatcgtaactgggtcatttatatgttattagttattttgtgttacatcctcatctatcgatttggcaatttgtttaatagctttatgtgattgtctaattggataaattggaaaatcatgtaccatcttaggataatcataaaactcaatgtattgatgatgttgcaacatcatttgttcaaatagcttcatatcaggatgtgtcatttcacgtccaccaccaaacatataaactggtggcaatccttctattgtgccattaattggcgatatgcgcttatctgttaatggtaggccattcgcccattttttcataatctcattgacaccaaactgacttagaaccgcatcttgttcgattaaggcgtccgaaatatctttattagatagtgttgcatctaaaattggtgagattaaatacaatttattcggtaatggctgttgattatctaaaagagattgtacaaaggataatgccagtgcaccacctgaaccatcacccatgactacgacattttgatgtcctacttcagatactaattgatcataaacacgttgtatcgcttggaaagtatcgtcaatatgaaactctggtgtctttggatagataggcagtacaacctcatataatgtacttaaagtgattttatccaacaatctccaatggaacggtgatggttgtagtgcattgaatccaccgtgaatatataaaattttcttatcaatttgatgtctgaaattaaagcgaaagacttgcatatcatctaatgacaatttttctaaatttgctttaacatttaatgttgaaggctgcttatgtttttttctattttcaatttctcttttataaaaaaatctttcaacatcttgatcatttttaaacataatcgagcgattgtgaagcaaatatttattgacaacgctattcataacacggtttctaatcaatgtcttaacctacctttatatattttatgtatccaatgattgtctatcccctacattctttgccaaaaaaagtatataatgtagaagatattttctttttcactttcaaatttaagactacaattgaacagtgatttttcatcattataacagacaactagacatattgataagtaaagaaaagaactttatacggaggtaccttgcatgacaaatccaaatcaacgattagaaccatttgatgagacatttcaacaaccgaatattcatcgtggtaagcgatatggtaagaaaaaacgttcattggtaagcatgattattcaaatcattgttgttatattaaccacaatcgctggatacagcatgtggaaacaacccatttttaatattgtcttcaccaaagaatctgtagattttgatggcattaaaaattttaacgagacaattggaaaaatgcatcaattaaatattaatttgggtaatatcaatgatttacaacaaggaatcgatcgcttaattttagtctttaacggtttctttattttatgtatcgttagcctagtcataacaatactgacaattgtatttaatcgcacagttctaaaagtagtaaatattttagtgttaacaattatgttagtcattacattgtatttcagttatattattaaagcactcgcacaagaaattgcagatgttttcaaaaaatattatttaaatgtaccaccagatcaagtgattacagaagctgacgctattcataacggcatcattttacttggctgtagcatcggtttacttgttataagcttattcttccgtaatcgcatgcctcgtttaaaataatgttatatagtagggattgggacagaaatgttattttcacaaaattcatttcgttgacccacttcctgctttttctttattaatgacctactacgtcaatgccaaattttaatataattcctctaacattctataaatcaacaaataaaaaaagtatcgataaccatatttggcaccgatactttaaaaatcatgtccccacaacataatttttgattagtcacacttcaattaatttattttatttattcatgattgatactattatctgcatctaacttttgagctgtagcttttgcttttttattactttgtaaaaataaacataaaattaaggcgatgatgctaaatatcgttgcaactataaatgcatcattaataccttcaaccgttgctagtttatttacaaattgtagtaacactttcattgcgccttcttgtccgccatattgtgatgctaattcacgcatatgatcttgtacaacaggattcgttttatctaactcttccccaaaagctgataagtgttgtgtagtttgtgttgtcattacagtaactaagattgctgtacctatagagcctgctaattgacgcatcgtatttaagaaagcattaccatgagaggcaagtcgtcccggtaacgcattaatagctgcagttaccattggcatcattataaatgccataccaaatgaacgaagtacatagatacccatgattgtcatatatggtgtatccatatttaatttagttaattcccatgttgcataagtcattacagcaataccaaagatagctaatggttttaaaccaatagtatctaacaatttacctgcaaatggtcctagtagacccataattagagaaccaggtaataataacaatccggaatctaatgctgagaatccgcgtaaattttgtaaataaatcggtaataaaatcataccaccatataaacttaacattacaaccatattaataattgttgttaatgtaaatgttgggaatttcaatacttctaaattcaacattggtgatttcattcttaattctctaataacgaatagaataataaagataataccaatcgcaaacattgtttctatctctactgaaccccaacctttgttgccagcttctgagaaaccatataacaaagcaccaaaaccaatcgtactaaaaatgatacctgggatatcagctttagggtttgttgtatattgatataacttaaaccatacaaaaccaattaaaatagcgataatcccgataatgaacataccgtaaaacatcacattccaatggtaattttgtacaatataacctgataatgttggaccaattgcaggtgctaaaatcattgcgatacccattgtacccatggcagcaccacgtttttcaggtggataaattgtaataataacaattgaacctaatggcattagtacacctgcaccaatggcttgtaatacacgtccaaccatcatgattgggaaattcattgaaatcgcacagattaatgaaccaattgtaaagagtactaacgcaactaaaaataattttcgatatgaatatttattaaatagatacgccgtaattggtattaaaataccgtttactaacatgaatcccgtcatcaaccattgccctgttgacgcagaaatattaaattccgtattaatttttggtaaagcaacatttaataatgtttggtttaaaatcgcaataaacataccgaataataatgccgctaatattttaccgcgtgaaacaccttcaccaaaaataaagtttttatgttctttttttattttttcattcactttatattcttctgattcaggatttttagcagcaactgcttcctcatccttattattagtgaatgcttcttgatctttctcagacccctttgtgtaaccatttagactaacttggctatgatcatcttgattgtcaacacgcaactcttcatgcgtcatacgttgtgtcgattgatcagttgttttgtctaaatcactagctttaaatttagattgatttgattgacgtgtcgtaaattgttgttccttttgttggcgtttgcctttttttcttgatcttattaaaaataaattgataaccccaacaataatgagcgctaaaataatgtagctaataatgaaggtcgtagtcatttaatgacccccttaatttttatggatttttacttcagcgttcattccaggaacaacttgtttagacggttctgattctagagtgattttaacaggtattacttgagaaactttagtgtagttaccatcactatttgatgatggcattaatgaaaagcttgcagcagttgcttttccaatactatcaactttacctttaatagaagctttttgaccgtcaatagtcacatcaacatctttacctacttcaacatctttaatatctttttcgtcaatatttgctgttacatataaatcatctaaattgtatgcataagcgattgggttaccagcttgcaccattgaaccttccataccatctaatttggcaattgtacctttttgaggcattttaagatccatatctttcgtttcgccatcttgaccttgtacagtaacaattgctactttgtcacctttatcgagtttgtcaccttgtttaacattaagtgatttaatttgtccagatgcaggacttgctattttaatttgatcgccatttacttttgcattatcagttgttacatagcttgttgttttattccaaaaataaaagccagcaatcccaattgctaacagtacaacaaccgtaatgacattaattaatatcatctttttcatgaaacatttcctcctatttgcttttaaaattcactttatttattatagagacatgataactaaaaaaacaccaacaatttttataagagtgttggttaaaattcacaaaggtgtaacaatatgaaacgacaagccaaaatagaaattcaaaacgcacttgttgatttgatggctgaatatccttttcaagaaatatccactaaaatgatttgcgcgtattgtaatattaatcgttctactttttatgattattacaaagataaatttgatttattggataccatcaactcaaagcataaggaaaaattccaatttcttctaagcgcgctacatcataatttcgaaaatattaaacaggataagcttaaactttataaattcttcattattattgctaagtatatcaagcacaatgagcagtttttcaaagacattttagttacctatccaatgaaaacattattcatagactatataaatttagcgagagattactatcaacaaattatgaatgactatagtactacagtaaccaataaacagctttatgttacatatatcataggcggtcaagctggggtgtttattaattggctttcgaatggttgtaatgaatcacctgaagaagttgctgacattttattggctaatacgattaaacttcaaaactaataatacggtttcattctaataaagaaatgctataaaacaactagataaagttaaaccaaatggatagataatagtacatatgtaacggtgctatcaatataaaaatgccgagatttccacataataatctcggcatttttatttttgatgctaaattcataggtctatgaatagctcaagttttgttttttaatttttcaattcaatataatagaagaaactatgtttatcatcgatttgttttaaataccttcatattataaatctgtaaaataattaatataactgctgtagctataataataattatgtaaggtataggattatcttcaccttttacccccactaatggcgatgcaacaccaccaaataaaaactgtactaaacctaataaacttgatgaactccctctaccactactactttcatccatagctattgtaaaaccaagtgtcgcaacacctgtcactggtgctattaaaatgataaatcctatcgctaaaatccaaaagttccaatgattaagcaatacaatcgtcactaaaattacaccgataatctgaatcatcgtcatgcctctcatcaatttttgtgagtctataaaatcaacaaggtacccagtaagttgacttgatataatgagcgtaataccaattcctgcaaacatccaactaaattgtattgcagtcatgccataaattttttgaataataaacggagacgcagaaatataagtaaataatattacaaatgtcataccttgaatgagcattggtaatacaaaacgtggcgtcttcaataatattttgaagtttttaaacattgtctttaatccactacttgactcacgatttgtcactgttaatgattcaggtacttttaataaagaacctatgaccatgacgaagccaaagatagtcagaatgacaaagaccatacgccagacagaataatttaaaattatgccccctattgttggcgcaacaactggtgcaataccattaacaagcatcaataatgccataaacttagttagttcattaccactatacatatcacttgctatagctcttgaaataactgctgctgcgccacctgtcactccttgaagaaatcttaatgcaaccatcagccaaatattatgtacaaaaacaatacctaaacttgctaatgtaaaaataatcatagctataataagcggctttctgcgcccagttgaatctgaaattggaccagcaaacaaattaccaaacgctaaaccaatcataaacatcgataatgttaattgtgcgttagacgtcgttgtttgaaaatcatgtctaatatctggtaatccaggcaaaaacatatctatcgataatgctccaatggccgtcaaagatcctaaaataataataaatatcggtgaacgcttgttaaaatgcgttaaatcattcatatgactatctcctttatataatgattagtttataactatcacgaacagaaactaaatttaaatatgctcttttatatattagcattagtcacaagtttcatgaacatcattacaacttataaaaggtataaaatgatataaacctcagcacttcataaatttttccacaaaaaacaatcccttcaaagtaattcacactaattgtaaatactttgaaaggatgttgtttgtattccatgacacatgcatcttatttaagttttatactctatttttctgatgtcttgattaattgcaagcggtcttgcgagccttgttcaagctcatattctttatctacttgcttaccgttttcatttattaatcttacggttgcggtaatcttatcaccatgtttttcagcatctataatttgtggtgaactaatcatcattaaacttcctttagatacacgcttctttacatcatcataaaaagatgatcctttttttatatatgatgatacaaaatcaaaatccgactgattaaacgcagcattattcgctaaagaatatccagcaaagaattctatcaatttgttcttcaagctgttttcttctttttctttcttttcaacatagtcttcgatatcttcactgtcaaaattcaaagttatctctgtattgtattttaaatcgctagctttaatcgtcttcgtctgtgttgtaaatgttttatctttcgctttacctgaagctgaaatggtaatatctttattttgtggatatggaccatacgttttggaacttgaaaatgccatttcatggtcatttatagttacttttttagaactatcatttaattttgtatcgccttttaaagttacagatatatttgcttcttcaaaatcttcagtaacatctaccgtttcagaattactttgtctaaaatcaaattttaaatggcctgcaaaatcaccgttctcagttgatttcatagctggaattctatatgtccccggtataaaattacctattggcgtcactttatttgcttcagctataaccatctttttcttaccaccagatttaaactcatattttgttttttctttcggtttaacaattggttgcttggtaggtgcagtaaagctcatattatcgaaaaagatataacgtgtgccatttttacttacacgtaatatattttgaccagatctggtttgaatataagaagctacgctggtcttactcttattcaatttatgtaccgtatttttaaggtcgctgacaaattgcttaagcccaacttcatctttgatatagttaatgtatacttttgcttcttcagaatctactttattatctttagtacttaataatgttgctactttttgtttatcattattctcaatcgcattcactaatattttagtttgcgcttcaggtgaattgaagtttcttagtaaaaagaacaatataataattaagattaaaatgaaaaaaccaattgcccaaggcaccatttttctcatcttgatgttattagtttgtatatcttcatcggttgactttctatataatgcttgacgactatcaaatttatgtccacattgtgtacatatctgtacatcatcttgtgcttgttgtccgcacttcgggcaagatttcatactttcacctcaattctgttcctcttcaattgttatatgtatatcacaaaaattatttcattattttaccattattattttacaaatattatcccaagaatacaattcaagaaatgattaactttactttagaattgtaccttattacattatttatgaaagtactctctcaattataactaaaaagaaggtgttcaatacatacatatttagtcttatatttgaacaccttcaaaaacctatttatgattgctatatgttttaatgcgatgattgatgacttctaatacttgccttacattttcaatatcttcagaatttaaatcattagtaatatcttgcgcaatatctgtcataatcgcattacgttctttcaaatatgctctacctttgtcagttaaggttatgaatttcaaacgttgatcaatatttaaatttggtttatctaacttaactaattaagcatcgattaactttttaattcgtcggcttactgcggccttatttacaccttgtctttgcgtaatttcactaattgtcaaaggttctttatttaacatacctaatacgttagactgctctaatgaaatttcatattcattttgtaaatctttcaacatttttgcagttaatgcgttaacgttatttataaactgctctaaaaattgaatatggtcttgtaaatgttttaccataattatttctccctaattactatttttataaagtatcctcagcaatcattgtatcgcacatctaaaaaacacaaaaatattgacccatatataatataacaaattaagatttacatgttgctgctttctccttgctttaataaattaaatcatctacatttatatttaatatttattataagcgaggtgtcagtatgttattgaatttattattaatatttatacttatcgttatttgtccgttaattttcaactatactctgacgttaaatttaacatgctacatcttagttgtcatatcgatatttttgtcactcatctatagcatcatgacctatactttcccttggtctatgtttgtaacatttataataatcagtattatcatgctattcaaacatagatatttattttctcatacttctagtcgcttatttattaaaaaattattatctttttcatataaatttgtactctacacatcagcacttctatttataagtacgattcagtcacctattgtgaaaggtttgtctatgtggttagctatattatgtctttccctgttactaacctttatttgttatctcgtttggacagtatcatatagacatagatcatacaacaaagaagttgatatcataattgtgttaggtgctggtatttttaccgaatttgtcacaccaatgcttgcagcgcgtttagatcgtgcacttgatatctatcaacaacaagcatcagcaacaaagatcattgtatctggcggacaaggaccagacgaaccaatttctgaagctttagctatgcaacgttatttgattgcacatggtgttgataaaacagatatactaatggaatctcactctataaatacatacacaaactttttatattctaaacaaatcatcaacaatttgtatcatgaagcagttaaaattgtttgtgtaacaagtcagtttcatgtattgcgcgccttacgactagcccaaaaattaggtttatctatcgatggtgtcggaagtcatacaccatatcactttttcttacatgtgctcatcaaagattatctaggcgtaatgtatcagtatagattgttattaacgttatattgttcaagtagttggtttatatgtctttacgccgcttttatttataatagttaatccacaaacaaactattattataggttgtttctaatattgcgtcaaactatctttaaatattcgttaatccttgattagacaattgttatattgaaaataaataaactaaagagtctgggacattaatccctaaaaaaaacagcagtaaaataattttcaattagaaaatatcttactgctgttctctatttatacaatacttcgtattgaatggcttcgctatgcccatctggcacattactgtaaaattctataaatagaatttttgatgacgggtcccttcctagggtgccgtctcagccaccccaaccggcacattgttgtaagctgactatatgtcagcttctgtgttggggcccctgtcttcgactggcactgctccctcaggagtctcgccattaatactacgtattaacatgtaattttacttttaaatactttaaaaaaataagacactttggccaacttaagccaggatacaatttacaaatagcgacaaattctcaatttgttttatcctatgacctatttcaaaacccaacagatactagaactttaattccatttttaacaatgattcaaaataccttcggttatttaccggagtatattgtagctgatgcatgttatgatagtgagcaaaactatatggctattatagatgattttaataaaacgccacttattacgtatgtcatgtttattaaagataaaactagaaagtttaaaagtgacatttttaacactcaaaattggaaatatgacgaacttaatgatgaatttatatgtcctaataacaaaagaataggttttaaaagatatgcataccataatgatagatatggttttaaacgtgacttcaagctatatgaatgcaacgagctgtacattataaaatacatatcaaaaaagctgatttctatcaaataattaatagaaatcagcttttttacattgcctaagaacttaatgtcccagcctgttttttgtaaacccaaatcgtattctgttatctaacttttatactactatgtcttaaatcattaacatttagcgtctttacaagccactaatcagttattttgccatcttctaattcaatcactcgatctgcatattcaaataatcttcgatcgtgtgtaatcataataccaatcatttgttgttctttaatttgttgacgtatcatctcaacaacttttgttgctctatcggcatctaaacttgctgtgggctcatctgctaaaatgattttcggattattcataaatgctctcataatcgcaacacgttgcttttcaccgccagataactgatgcggatatacattcaagcgatcttctaaaccaatatttttcaaaagttgtattgctcttgttgaactttgttgtttggtcattcccgcttcttgacctacgagtgtcaattgctctatcacttttaaataaggaactaaatgtgaagattgaaaaataaaaccaatatcttccaatcgtaaatcactaggacgatgctgtttatcaaacaatggcgcatcattgtaaagcactgtaccactcgtttgacttaacaatccgcctaatatcgttagcaatgttgttttcccagaaccagaggcaccatttaaaatgacaaattccccttgttccacttcaaaattaataccttttaaaacttttgtttcagacaaaccttctccgaaatttttgacgatatcttcaacgactaatgccattattctgcacctccaattgcttcgataggatccactttaaataatttgataaatgatagtgaggcacctaaaatcgctactaatataaatatccccaccattaataaaatattttgcgttgttaagtaaaaaggcatcgttaccggcatcataaatgatagtcctactatgatgatcacagcaatacctaccccaattattgttagtgttaaaatttgtaaaactaacgcactcaataaatgtcttgtcttaataccaattgctttcaaaatgccaatttgtgatattttttgaatcgtcataacatagaaaaatgcacttagaacgattgctgtaatagcaaacaaactaacaatcatcatatttaacggtgcttgctctgcttgataactcgcaatattacctgttaaatctttttcactcacaacttgaacgtcatttattttattaagctcatcacgttgttgttgtgttaaatttttcactggataaaatgccgtattaaccttattcaatgcattaaatccgttatcgttcaatagcacaatggaactatgcgcatacattgtgtcgtttaaaataccagaaactctataactagttgaattatttttaaaatgtaatctatccccgactctaatgttgtctgcagctaacttatcattaatagcgacctcatgagcatttttaggataatcaccttttttaagttgtatgcgttgttgtttaacgtcattcattgtaatcacatcttgttctttattagataatttcaatgtttgaatattcattttatatggttcttgatgaattacctttttaatttgattctgttgcgtatcactaagttgcgatttctcaatttgcggctctttcattttttgaacaacatattcatcattatcaaagtgttcaaataacgaaatattctccctaccaagcccttgagctaaaccactaataaataacaccataatacttaataaaagaatgattaatgtgattaaaatataacgaaatttgtaaaacataatctcttttatcgctaatttcatatcgattcacttctccctatttcttctttagcgtcagtataaggttgaaatatgaactcaatatgaacaattgtttttttacgcaaaaatattttacatgtataataaatgaaaaagataagggagtttatagctatggtgcaatgtcttgttgtcgatgacgatcctcgaatcctaaattatatagctagccatttacaaacagagcacattgatgcatacacacaaccaagtggtgaagctgcattaaaacttttagaaaaacagcgtgtcgatattgcagtggtagatattatgatggatggtatggacggctttcaattatgtaatacattaaaaaatgattatgatataccagttattatgttaacagcgcgggatgcacttagtgacaaagagcgtgcgtttataagcggtactgacgattatgtaaccaaaccctttgaggttaaggaacttatttttagaattcgtgctgtattacgtcgatataatatcaattcaaattcagaaatgactattggcaacttaacgctaaaccaatcctatttggaactccaagtatctaataaaacgatgacgttaccgaacaaggaatttcaattattatttatgcttgcagcacgtcctaagcaaatctttactcgtgaacaaataatagaaaaaatttggggctatgattatgaaggagatgagcgaacagttgacgttcatattaagcgactacgccaaagattaaaaaaattaaatgccacacttacaattgaaacagtaagaggacaaggctataaggtggagaatcatgtttaaaacactctatgctagaattgcgatttattccattacggttattttatttagtgcattaataagttttgtattaacaaatgtttactatcattataatttaaaagcatctaatgacgcgaaaatcatgaagacgcttaaagaagcaagacaatatgaacaatcagctaaaccaacgcacattcaacaatatttcaaacatttagggcaaatgaattaccaaataatgaccattgatcaaaaaggtcataagacattttatggggagccatttagagaagatactttatcacaaaatgctattaacaacgtattaaataatcaagattaccatggtattaaagataaaccattcgcattattcgtaactggatttttcgacaatgtaacagataatactgttggtattaactttaagacaaaagacggttcaatagcagtatttatgcgtccagatattggagaaacatttagcgagtttagaacattcttagccgtcttgttaatgttgttattatttatctcgatttcattagttatcgcatcaacctattcaatcattcgtccagtaaaaaagttaaagctagcgaccgaacgcttaattgatggtgattttgaaacacctatcaaacaaacacgcaaagatgaaattggaacattacagtatcactttaataagatgagagagtcattgggacaagttgatcaaatgaggcagcattttgtacaaaatgtatctcatgaaatcaaaacaccattaacacatattcatcatttattaagcgagttacaacaaacttctgataaaacattaagacaacaatatataaatgatatctataccattacaacgcagctgagcggattaacaactgaattgttgctcttatccgaattagataatcaccaacatttattattcgatgataagattcaagtcaatcaactcattaaagatatcattcgacatgaacaatttgctgctgatgaaaagtcgttaatcattttagctgacctagaatcaatcaatttcctaggaaatcaacgtttgttacatcaagcattgagtaatttattaataaatgctattaagtatacagatgttggtggtgccattgacatcgctttgcaacatagtcacaacaatatcattttcacaataagtaatgatggttcaccaattagtccacaagctgaagcacgtttatttgaacgtttttataaagtgagcaaacatgataatagcaatggtttaggtcttgcaattacaaaatccatcattgaattgcatcatggtacaatccaattcacacaaagtaacgagtatgtaaccacctttactattacactgccaaataattcactttaatctctacctcctgaaaaaacatttctgtttttatttcaggaggtatcttttatattgattagcgctttctagccacttaacatttaatttctaccattcaacaaaatttaaatatatcgatggtcatttatggtttaataattttgaaggaggcattaacctatgatgaaactcaatttatttatcaatgcaaatgagacggaatcttatattgatatacatgcacctaaaatgaatgataacgttcaaagtattattaatgcagtcaatgatttagacaaatcacatacattagtcggatacatagacaaagaaatccatatcattaatgtatcagatgttataacattccaagttattaataaaaatgtaacagccattacaagcaatcaaaaattcaaactaaaattacgactttatgaactagaaaaacagttaccacaacatttcattcgcatttccaaatcagaaatcgtcaacaagtattacattgaaaaattattattagagccaaatggacttatacgtatgtatcttaaagatgcacactacacctattcttctagacgttatttaaaatctataaaggagcgcttatcaatatgaaaaatttgaaaaactcattatttattagcttaatcattggtttgtccctttcactgttctttagtatgttatttgcagacggcaaatattatccactgaacccacaatcaactattggcatattgtattatacgcatttcacagaaactaccgtaatgttgatttctatcattttatggttactcataggcgtcgtctttttccttggagattttatctttaaatacacagattggagcattactaaagcaactataatgcatttcataacaacgtatgtcggattcttgcctttagcaatgcttgccggttggtttccactaacagtgcattatctaatcatattcacaattatcttcattgtggtttatgtattaatttggataattcaattctttaaaaacaagaactacgtagacactattaacaagcaactgaaacaattaaaatgatttttattaaccactaaaaaacggtaatgtctatcacattaaaaaagacattaccgtttcgtttattatttaacttgtaaatacttagttacttcttcattaattttatgatataaatcctcatgatctgttaagcgataaccaaatgacggcaccatttctttaatctttggttcccatcctttgaattcatcacgatagcatctctgtaaaacatcaaacataatatctacagctgttgacgcaccaggtgatgcaccaagtaatgcagctaatgtgccatcatctgacgtaataacttcagtaccaaattgtaagttacctttagaatcctcagtatccttgattacttggacacgttgccctgctgtaatcacttcccaatcttcatttttagcatttgggaaaaagactcttaaatcatccatacgctcatcattagataacatcaattgtgacactaaatacttcgtaagactcatttctttgatacctgcagataacatcgtcacgatattatttggtttaaccgatttaattaaatccatatgtgaacctgtttttaaaaatttaggtgagaaacctgcaaatggaccaaataacaatgaacgcttgccgtctacaaaacgtgtatctaagtgcggcactgacattggtggcgcacccactgctgcttttccgtacactttagcatgatgacgatcaatcacttcttgatttgtacagcgcaggaataatccacttaccgggaaaccaccaatatgttttgattgtttaatcccagtcttttggagtaatggtaaactcgcaccgccagcaccaataaatacaaaatcagattcatatgttgtcgtttcattagtttctaaatctttaactttaactagccataccccagatttctgtttcttgatgtctaatacattctgcttatattgaattcccacaccacgttgctctaaattatcaaataactttgcagttaacgcaccaaagttaacatctgtaccagtttcatcataagttaaagcaattggttcatcagacttacgaccttcaatcattaacggtacccaagatttcatttcttcttcatcttgcgataatttcattttttcgaataaaatacttttctttaacgttgcaacacgactttttataaaagctacattatcttcgccaatgacaaaactcatgtgtggcaccgcttgaataaagcgatctgggttatctaattgtcctgttttaactaaatatgcccaaaactgttttgaaatttggtactgctcatttatcttaattgctttactacaatcaactgtgccatccttaccttcttttgtatagttcaactcgcaaagtgctgaatgccctgtaccggcattattccatacatttgaactctcttcgccaggttgtgctaatttttcaaacactttaatatttttctcaggtgataattctttaagtaatgttcctaatgttgcactcataataccgccaccaattaagatgacatctgttttgctatgttgtgttgtcataacaaatacagtccccctttttaaaatgaataatggaacgttcgagaaatacgacatattaataccactttaaatcaataagtgtctcaataggttcccatggtgatgctctattactatctactatgtatattaatattttataataacgaaactactttaattatatactttatgtgcgatagcacaaagacaaaaccacaaaccttaacagctatcaaccaatttaatttgattgctgattactcactattcattttaacataaagcgctaccattattataatgtcaaacttctttcattaatgatccataaaaaaaagatgagatgttagaaaacatctcaccttctgtatatttatattttgaaatacgtttttttataataatgacaagatgaaagtccaaatacagatgaatattagtaaacatacactgtatttcaatgtcatttttaataattctgattccttaccaacttgttttactgctgcagttgcaattgcaattgattgtggtgaaatcaattttgccgctacaccaccaactgtattagcagatacaagaagtgaaccacttgttccaatttgttgtgcaacagaagcttgaattggtgcaaataatgagttgttatttacaactgatcctgtcataaacacacctatccaacctaaaattggtgatagaactgggaagacattacctgctttagcaataccttgacccattgctgcacttaaaccaccataagttgtgattttagaaattgctaagatgaaacaaattgtaagaactggtaaccacaactctttaaatgtaacgccgaataatctacctgcatctttaaagttaacctttttagacattaaaattgtaataataatagttaataaaatagctgtacctgtttgtccaataatatttaaagtcaatactaatggtttatgcgtaacttcgctgattgttccaggtaagttgaatttaaatactaatgatgataaagcaccatttggtaagaataagtttttaaagaatggcgcactccaaatcattacaatgactgttaatacaatgaatgggctccatgcatgtaatactgcttttgcagaatgtgcttttgcaggttcaatttcttcatctttattaacacgataaatgtgttttggttggaattttttagaaaatactgctaatgctaacattgttaataacggtggaataatatctgctaattcaggtccactgaatacagttaataatccttgagtaagtgtataagtgattgaaactactaaaattgctggtaatgtttctttaacacctctaaaaccatcaataataaagataagtaagaatggaataatgaaatttatgattgccaatgttaaagttgctgattgagaaacacctaatactgaaacatctccaggtaatttcaacgtttctacaacacctacagggataccaatcgcaccaaaagcaccagacgctgcatttgcgactaaacataacatcgcagcttttaatggattaaatcctaattgtgttaataaaagtgcacaaattgcaattggtacaccaaatcctgctgcaccttctaaaaatgcgttgaatgcaaatccaataagtaaaacttgaatacgttggtcttgtgaaatatttgtaatactatcttgaattgttaaaaattgtccagattcaacagtaattttgtataacaatactgccatcataacgatatagccaatcggaatgataccttggaagaaaccttcgactactgcaccagaagcgataccaactggcaatttgaaaaatggtattgcaattagtaatgttacaacaagtgttgtaatagctgcataaatacctttcattttaaaaacagttaaacatagtaaaaacagtacaatcggtattgctgcaattaaagacgataataataaattatcaaatgggttaaacgtatttactaacataggctgactcttctttccataaagtagtagtgtaattgcttcattaaaatcatgctctggctatagcattttgttatcgataacattttacagaacagtgagattaatgtgatttttttcacaattaaaatataccattttttcagactattaacaatatcactttcctatttaattgttttatttttcattttaaatctgttcatcaaaatgaattgtacttaatgtaatgaagtaacttatactattcatgaattttacataagaccgtgctaaaataaggaagatactacgatgaggaatggaagttatagcaatgattaaacagataaatgtttctaatatgcaaaagtttgaatctcaattaatgaaagctcagtctgaaggttatacacatgtcgttccatatgccaatgagataatgatttatcaatcgatgttagatgcggttcaattatatcctaagtctatcgtggttgattatactgtggatggacaatacaaaaatgattgtcactatttcggtcaatcatcgatcaacattgccgattgggctcaaaacaataattattatcctaacctgatatatgcgattcaacagactcttgatttaatacattattactctgtagaaacgattttcgatttagctttattgacacttctgaaaggtgatttatcaatcgatggtcatgtcgtttttgattttaaagcccctatagcaacaagtgcttcaatatgggaaactattaaaactattgaagattttgatatgatgtctcagttttatttgaataaaatggcttatattgatcatcatcctataccttttcgcaacctttttatcgaggattcagaacaacttaattcgccagataattggttgtattctaccaagtttatgctacctaaatggttatataaaatagcaaagcaacgtgctgataacaaacaattacaaaacttcggcctgtatacgaagcaaccaaacgttttaaaagatcacatcgtttttatcggtgatcatcatcaatatataggtaattcaaaatatttatttacttacttcgttaaacataatccaatgactgcctgttattttgttactgacgatcgtcgcggaccacatttcatatcacctaagtctgaaaaagctgacgaattgattaacagcgcacgcgtagttatagttgaaaatgatatacctgaaacgttacaaccaaacggtactttaattcaattacatcaaggcacaccaataatgcaattatttttagatagtaaagagcctattaaaaatatagaaacacctttttatcgtgctaaaaggtataatcgctggttgcaattcgattatgttatacattctgctgatgatattagccacttttatcaaacggcttttcctagtcaccaagcaaatgtattggcttatggtaatcctaaacaccaatatttactacaaaagagtaacgaaagtactactcaacaacagtataagaaatcgtttaaaataaatgatcaaaaaccagttttattatacgcacctattggattagtgagtgcgcaacaattaccactatcagatgctttattcaaagcctatcatgttgtggttcagggtgttgatgaagcgatcttaccagaagaggcgcttgttgcaccaaagtatcttagtgctcaagacttaattctaatgtctgatgtcgttatcactgattactcaaatataatatttgatgcgatggctatagacaaaacagtagcattatacactccaaatcacagtcaatacattgagtctcaaggtgttaacgaagatatttggcgtcatctatcaaaaatttggtatacagaccgacaattattaattaataatttaatttcccaggcaataccagtgattaaatatccacaaatacaacataaagaacaaccattagaatctatttcacaacttatattgtctaagatgacatctaatcaatagtgtttaaatttctcagtggctgtgaatgaggtttaaaagtactataaaacgtaaactttgatactttaaaatacgcaaaaaacggtaaaccctaattcatattatagagtttaccgttttattttttaacttgcatcatagttatattaacattattgttggtagtttggatcagtaaccattgcttgtccagtataatcaaccgttacaattgaatattttccatttgcatttgggtctttaaaactaaacacatacttatagttgccattatgttcttcaatagaataatcattatacactttattattactaccaaatttatttgcttcattattagccgcatttaaagctgtttggaaatttggcaattgctgtaaagcttgatttttatttccattaaacggataaatttgacgtgcaaccggcgcggcattttgtccataatatggtgcaacgtaacttgatttttgattattattcgcttggttattacttgattggttattatttgtttggttttggtcattgtttgttgcatttgaattagattgttgctggttatcgtttgcactattatctttattatctttgtttacgtctttactatcatctttattatctttcttatctttagatgaatcatttgtttttttatcttgttgttcagttttcgctttatcatctttttctttattaccgtctttttgttggtcactatcttgaccacatgcagctaaaaataatgataatgctagtaaccctgtaactaatcttttcatacatatctcctcctataattcgatattcattgaataatcttgaaatacatatctaccatgtgtatcttttcatggcttgttaccaaagacgtcaacattaatatgatctgaattatcacaatatccataactacaatctaaggttctttttattataccctaatttttgttcattattatttaatttttgtgaattttatgttttctataaatttaattattttactttaacaattcattacgcatttagcatttcaaggtatacacaatatttattactatgatttcattttatctgctgcaaaaacaatcattataactctttttccataattaaatctgtatccgttacatcacctgtttgaaaatgatgttcaccaaccactttaaatccatgacgtttataaaatgcttgagcacgaggattatgctcccaaactcctagccaaattttatgtttattatgttcttgagcaattttttcggccaattctatcaattgtgaacctcttccgccaccttgaaagtctttcaaaaaatatatgcgctgcacttctaaataggtctcccccatttcttcagtttgagcactattaatattcatctttatataaccaacattcgcaccatcttcttgataaaaataatgaaatgaatctacatggttaatctcttgtgtaaatttctctacagtataattgtctttaaaaaattgatcaaaatctttgtcatcatagtaagaaccaaacgtgtcataaaatgttctagttgctaattcaactaattcactagcattttgttctgaaatttctttgattatcccagccatataaatcctccaataaacagtgatcgaatcaaaatattacttatgttatttttcagccaaaactatttaaaaatacattaacacaaatcaattacaaattgtattgattgtgtgtaacatcaataaatgatacatttattccagtaaaatggccgtattttcaaaagagaaaaagagaggatgtatcgttgtgatagaaacatttaaagcgtttgtaattgataaagatgagagtggtaaagtgacaccaactttcaaacaattatcgcctactgatttacctaaaggagatgtgctgattaaagtacattactctggtataaattataaagatgctttagcgactcaagatcataatgcagtcgtaaaatcgtatcctatgattccaggaatagatttagctggaacaattgttgaatccgaagcaccaggctttgaaaaaggagaacaagtaattgtaacgagttatgacctaggtgtcagccattatggcggttttagtgaatatgcgcgtgtaaaatcagaatggattatcaagcttcctgatactttaacattagaagaatcaatgatatatggcacagctggttatactgccggtttagcaattgaaagacttgaaaaagttggaatgaatattgaagatggtcctgtactcgttcgcggtgcttcaggtggtgtcggtactttagcagtactcatgcttaatgaacttggttataaagttatcgcaagtacaggtaaacaagatgttagcgatcaattacttgaacttggtgccaaagaagttatcgatcgacttcctgttgaagatgatcataaaaagccactcgcatcatcaacttggcaagcttgtgtagaccctgttggtggcgaaggtattaattatgttacaaagcgtttaaatcatagtgggtcaattacagttattggtatgactgccggtaatacttatactaattctgtattccctcacattttaagaggtgtaaacattttaggaattgactcggtatttactgctatgaaattaagacagcgcgtttggcgtcgtctcgcaaaagatttaatgcctgaaaatttacatgagatcaagcaagttattacatttgatgaacttccagaacaacttaacaaagtaattaaacatgaaaataaagggcgcattgttatcgatttcggtgtagataaatagtattcatgaaaaagacatcccgttatgcgagatgtcttttttaatttagtatttgatatacataccgcctgaatctggttcggtaggtataaatccaaattttgtatataatttatccgctgggtagtctgcaatcagactaacgtatgtactctcaacagccacacctttaatatattgcataatatgctccataattagactgccgtaaccttgaccttggtaacttttcaaaactgcaatatcaacaatttgaaaaacagttccgccatcgccaatcactctacccataccaattaaccgatctttatcatacaaggttactgtaaataaggcattaggtaatcctttttcagctgcttcgcgcgtctttggactcatacctgcgttaatccttaatgcgcaataatcctcgcaagtcggaatatcatatgtcactttaaccattatttaccccacttttcatcacacaatatatcaacctagtataaatgtttatttacaatagtcttattcgcttctttaaacacttcatgatgacttgaaacataaccctctgcattcgcatctggttggatatatgttttagcaaggttcgctgcatttgcaccatcactaaatgcacttgcaattagatgtgattttgcatcatgataaacaatatctccacacgcatagataccaggtatactagttgtcgtattaccaaatcctttaacacgacaatcatcatgcatatctagctttgaagatgtttcactcaataatgtattacaacgatcaaacccatgactaataatgacatcgtcaaatttaactgtatgcctatcgccactttcaacatgttccaaaacaacttcacttatatgcgtttcatcatcattgccgaccaagtatttaatacgtgtttttgggcatagtttcacatttaaatctgtcaccaacgttttcatcgcttcatgaccacttacatcttcttttcgataaacaactgtcacgcttttagcaatcttggcaatatcatgcgcccaatctaatgctgtatttcctccacctgatattaatacatctttatctttgaaacgtctgtaactttgtacaacataatgtaaattagttaattgatatctctctacacctttaacatctaattgttttggattaataatacccgcaccaattgcaatgataactgctttcgatgtatatatttctcccgcttctgtttcaacttcgaaatgacgttctgcctttttcctaatatctaccacacgttcattcaaatgaacttccggtttaaaatataatccttgcttaattgtatcttttaaaatttcatgacaaggttttggcgcaatgccgccaatatcccaaataattttttcagggtaaattctcatcttaccccctaattcagattgaacatctatcaatcttacagacatatctcgcaatccagcataaaagcttgcatacaaaccagacggaccgccaccaatgattgtaacatctttcattatgtgcctcctatgactctctatattcatttctttcattaacgtgctcaaattgataattattatcatttaaagccattatactattaatatttatattgttaaaataaatcgcatagttagccatgaattatcaataactatcccatcacaatataaaaacacacctttcaaagtaagaaacaacaatgttcctttgaaagatgtgtatattttttagttctagttatattattttttaaaagactcatcacgtggttctttaagaattgcttgtcttaaaaggaaaaatagcaacaataaacctgcaagcatacctgtgtgcccaatacctgcaaagcctgcaaatgcttctggagagtatgatttaccagtgacttggaagaatccttttgtcaccatcatacctatagtaacgataacacctatgttatatacatagaagaaccagttaaataagtagtaacttgataatttaaataacttctccaatggtaataatattaaaaacataaacatacctaaaataagtgtatgtgtgtgtacaagtgataattgtgttgtaccagtaaaatcatatgcttttgttagctctctatagaaaaagccactaaataaacctatgatcatataaaaaagaaatgaatataataacctacgcattttgaatcctccctcaccttttcattatatccgattatacctattataacagtgacaaaaaagcgaagatatgacacaactgaatttggtttagcacatagtatgacagctaaaataactttacatcaagcgctatacaaataaaatagctataccatgacgctcgctacaaacgtcttgtatagctattatttctatttattaaattatgacggcacttcagtacgttttgtgctatgttttctaacaatagctgaaactaaacttgatacagcgccaaaaatcataaaccctataaacatccacattgtactatttaattcaatatgatgattcaagtataatagttctcttacacttgttgcatagtgtgtgaatggattccaatcatatacatatttttgataactttcaggcaacatttgtttaggtaacgttacaagttgcatactaaagaacattaaaatgaagaaaattggaactgacttcatacctagccataccataacacctaaaataaggcccacgaaaccaagaatcgcaaatgctacaaaaattgcgatacgatttggatggtcaaaatcaaatctttgaacgccttgcatgaaataaatataaacaaagctacctgcaaatgctgcaacaactgcaaatatcatctgtccaattgaagcaatgatacgatgttgcacgacgatattgttactagttctaaatgcaaagaacaataagatagacgttacgattgaacctatccaaattggcataaacattaggaatggtgcattaccacctgcttggtgatctttaactttattaagtttttcattatccacttttactggattcgtcaaaccattgatgtccgcggcattgactttaacattttgactcgttaatgtttccaaactttgcttcgtaatttgagcattaatattatcacccataccagttaacacagctgatgcaatttgtgaaccttgtaagcttgatccttcacttacaatcgttttaaatttagcctgcttaacctctacttgttgattccccattttttgtttcatttgttgaaccacttgtggcggaatttcacctgaagcaactttttgttgcatttcttcttttttactatccataactactttttgtgttttactcatagcatcttttgaaaagtctttatcaataatagctactccaaagattttttgatctttcaaatctttttcaaggtctttttcactatcaaccttaacccatttaattttattagaatcactatctaataatttatcctctaattttttaccaatgttaacatttttatcttgaatcgttgtacctttatcttcgtttaatataccaattggtaaatcttttggtttaggattatatgcaggataaaaagctaaagaaaagattaccaagataatcatagttgctattggtgcaatccataataatttatttttaaatatattcattttattaattacctccttattagacaatgtgttgaatatttcgcatgttgtctattataatatgtaagtgggaataaacaatacacaatgttcatcaatacgttcattaatagacaaatacacccacattgttcaataacacaaggaggttgatttatttttgaaagaagataggcgaattagaaagacaaagtcctccattaaacaagcgttcactaaattactacaagaaaaagatttagaaaagattaccattcgcgacataacaacacgcgctgatatcaatagagggacattttacttacattacgaggataaatatatgttactcgcagatatggaagatgagtatatttcagaactaacgacatatactcaatttgatttgttacgcggttcttcaattgaagacattgcgaatacttttgtaaataatatactcaaaaatattttccaacatattcatgataatttagagttttatcatactattttacaattggaacgcacgagtcaattagaattgaaaatcaacgaacatattaaaaataatatgcaacgttacattagtatcaatcattctatcggaggcgttccagagatgtatttttacagttacgtttccggagcaacaatttcaattattaaatactgggtaatggacaaacagcccatttcagttgatgaattagctaaacatgtgcataatattatttttaatggtccattaagaataatggcagaaaaccgtttgcataaatcaaaccttgattcactaacttaagtaatactcgcttttcctaaatcctttagaaaggaactatatatcatgattacttcattcagacattctgaagatatagataaacatattataaaaacaccattagatcatacagcgtcatggattaatgtagtagaaccagaccgagaagaaattgaaaatcttatggaacaatataatatacctgaagactttatacgtgaccctttggactcagaagaaagttcccgtattgaatatgacgaagatactggttactcattaatcattattgatttacctatcgtcaattcaactaatcgtagcgttctatcttttgtaacgattccattaggcattattattggcaacggtattatcgtaacagtttgtgacgctgaaaatgaatttttagaaaatttacctaagcgtgatattaatttaaaatttcacagcagatttgcattagaaattttaactactattgccgaccattataatcgtaacttacgattacttaataaaagtagaattcgtattgagaaagaactaaaaaataacattactaacaaacaacttttcaaattaatggaagttgaaaaaagtttagtatactttttagctgccttaaaaggtaacgatacaattattaaaaagttattccgtttacctgcaattaaacgttttgaagaagatgaagaattactagaagatttaatcattgaaaataaccaagccatcgaaacaacagaattacatcaacgtatcttagaaagtatcacaacatcatacgcttccttattatctaatgatatgaatacgattatgaagacattaacacttttcacggtactattaacgttaccaacactcgtatttagtttcttcggtatgaatgtgccgttgccaattgatgaccatagttatatatcttggattattgtggtaggtatttcattaattcttgtcgtaattgttagtattttcttatggcgtaaacagaaattataactaaattaaaaggtatgacagcttaaagtttcatcctattgcatttgcaatgactgatactttgattactgtcatacctctttttttattctacaacttctttatttgcttttcttttagataaaattaaagtaactgttatagcaatgatgaatgatattgtcataccaacaaagtagtgtaaccatcctgcatgtactggattgattgaaataaatcctggcaatccagcagttcctaatgcgattgctttaaccttgaagaaagcaatatatgctgaaccaatacctgatccaacgatagcgccaataaatggatatcttagttttaagttaacaccaaacatagccggttctgtaataccaagtaatgctgaaatacctgcggcagatgccacaccttttaacttcttattttgtttaataataaagaacgctgcaattgctgcaccaccttgtgcaacattagacattgtcgcaatcgggaatataaatgatccacccgttttagtggcatctgcaattaatgtcgtttctacagctataaagctatgatgcatacctgtaataacaatcggagcatacaataatccgaatattaatccaccaattgcaccaccaaattcataaagccatgttaaaccatctgataaccagtaacctaattgtcgagtgattggacctacaaatgaaaatgttagaaatgttgttataaaaatagataacaatggtgttaacaaattatctaacaccgttggaataactttgcgtaaccctttttcaattgaggctaagatataagctgctacaagcataggtaacacttgtccttgataacctacttgattaatatgcaaaccaaaaacatcccaatatggaatagccttacctgcttcaactgcttttgggaaatcgtatgcgctcattagcgatggatgaactagtatcatacctaatgcagcacctaaaaatggattgccaccaaagcgttttgctgcactaaatccaattaaaattggtaataatgtaaatggtgcattcgcaaaaacatttatcatttcagctaatccagcaaattgactatatacatctatcaatgatttacctgaaaagaataaatctttcgcagtcaaaatgttatttaaccccattaataaaccaccagcaacgatggctggtataatcggaacaaagatatctgaaagcatttttacaaatcgctgtaacggattcatatttttagcagattgtgctttgacttccgaagtggttgatgcttcttttccagttaatttttccagttcactaaatactttattgactgtaccagacccaataataatttggtattgtcccccagtagaaaacgtccctttaactacatccatattgtttagcgcctcttcatttactaaactttcatcatttaaaactaatcgtagtctcgttgcacaatgcgccattgcatctaaattctcttctccgcctatcgcgttcaaaatttcttctgcggattgcttataattcatatatttagcctcctaattagaaccggttccatttattccactttattgtaaccggttccaaaaatatttgcaacactctattatcattttatataaacacctacaccatttttgatagcgcattcatttttattgctatactacatgcatgtatattaacattaattatcggaggtaattttatgaaagaacgtggctatatcgaacagctttggcgtgaggaaaaatatcatgtattgttacacagtcaacagtcttaccaaatgataaggaatgctttaaaaacggatttatcacttcatcaagttcaacaaatgattgatgttgctttgttaattgaaccgagtataggaagtgtatgtaatgcttttgatcatatgtggggatatttaaaaaaatgtgcgaatgaagaagaaagacaacaatcaaaactacttaaagctgattttattaatggtaaaatcgacacccaaactttattagattttttagcagaacttgctaataaatatgatgttcaatatttactacaaagtcgtgttttaaacacaaaaagaaagagatagattgaaactttagttgtaacggacaaatagtagtcattggagttcagcaattcatactttgtactaaagtttactataatctatctctcaaggtttaaatgtacatatctatattaaaatgcgtttcatgatgttagaagataccatacacatttaattagttacagcataaatcaatttatacccttaattattacattgtttatattttaaattcgggggagtaattttaagtaatatcttgttgctgctaattctattgttaataaattgatattagatgtagaaattgagtgtgaaagttaataatagatgatttagctagtaacataattaattcatatatagtcaaaaagttctgttagatactgttcttgatgaatattctttgatgttaggtgttagctattctagatgagtttcttagatgtggatgcctgtcttgatgaagttatctatgatgttaatataatacttgatgttgattcttagatgttagtgcgatttcaagatgctgattctttgttgttgcactatcttggtgacgtttctagttgtttatagttatcgcatctcttgatgtaaaatctaagatgtttatgcatttctagatgttaattcttcgctgcttaagaattatcttgatggtaaatctagttgtgccatgcattttctcatgataaatctaaggtgttaattcattgatgtgtgctgtttcttgttgcttcattatcttgatggtgaatttcgttgtctaatgcactttttcaaatgattattctaattgttacggcaataactagatggattttcttagatgttcacttttctagatgtttatacttatcttgatgttttctaaacagaacttttaaacgctttattttttagtagattgtttaaaatttcttagttgatggttattgttgttgatttgaataatttgtagcgaatattttgtaacagggctactaagaatttttataacaagaagtgatttcaatcgtactaattttcagcgtttgatgacaaaagtgtatgtccaaacttaaataatggcgataaaatttaagtcatgggtacatttaatgttttttgattcaaacttccattttggtcaatttgctttttttataacatagttgaatatcaataaaagattagcaagttagttcaaaatggctatgtattgttttttgaaatacataggtttgaaatctatattaattatgcaccaaataatttaattagactctatcgaaaatttccaaattttgcttactatctttctaattttacttttatattgtgcgcaatgcataaaaacaagcgttttcctaggagttttcattaatttcttttatttttcactattaccttttcaaaaatattcaactataataggtatactatccatgattttaaaaatttccatgttttacatttaaatgatagatttcaatatatattaggcaggagagagaaatatgacatgccaacttaaaatacatcatacattatcgacaataccaagtcgtaatattaataatattatggtgctattttcacttacaagtaaactcaatattacgattaatggtgaaaccaaagacgtaagtaattatattatcttaattaaccatggtgatatttataatattaaccacggcgaaaatataatcgaattaatgatacccgttttttatttttatcaacaagatgatgatttctttaatggttatttagatcgtcatttattacaatcaagtaattatattaagtcattaattgccgatttaatcagtacaccaacaagttcttctttaatggggaaaaatataggtcaaagtattatagacactttacttaaagaagcttttataagaatagatcatgaatatttaccaaatattgctttaagcaatccggtgttcatagactgtgtaaactatattcatgacaatattgatgcgcacttgtctttaaaagatatagcgatgcattgcaacatctctgaatcatattgttctaatctttttgttcgatatttgagtatgaattttaaagattattttacaagtattaaacttgttaacgccatcaatttattactttctacaaaacattctattacaactgtttctgaattggccggttttaacagtcatacaaattttgcaaatcaatttaagaattacttgcattttagtcctaaacagttccgttcactcgtttccaagattactgaaccaccacaaatacacttccaacaagataacgtatcacaattcactgagttaatttcaacaattgatttaacagctcaactggctacaaatacaacagatattcatatagatgattttaatccgaaagatcgaagtcagcgtgccaaagtatttgttcgatttagtaatttcaatgaactatttcaatttattttcaatgaatattacgatattaactttgagcacttaccaaaacctgtcgttttcattgacgatattcacgatattgagattagccaaacgaattacaacctgttaaatagatgttttgaaaagcttttcgaaaaaaatataggtttagcaatcgctattaaatcaacacaacaattcgaaacgatgaagcaattaatactaacatttttacaaggcaatcaagactataagacaagcaagaaattagttaaatttatgctcgtattttgctctaattctatgacagcagaagaaattcatttatgtcatcttaaaattaaaaacaaaaataaagaaattaaatatagtgtgacagtcgatggctttttagaaacttattcaaccgtggaacaagtttatgatgtcatgcagcgtcttaaattccattattactttattgatattgaaaattcaaaaactgcaacacatcttatcactaaaaaccaacactatcatcaaactgacactcattttgaacagtataagaaatttattttagattcaggtatatcatcaacacaatttgtatataataacctgtctgtaagcggatttaaatatactaatgatggtaagaatccaattcaattatctgacatagtgtatcacttaatcgcattattacgatatggcggtggcattagctatcaattattagatgaccattcaaattatatttccttgtacaacaaatatggtagcccctaccattaatgcatttatataaaatgtttagaccttttgttaatgaagatattgaaattacaaataattatgtattgagtcgtaaagataataactaccatttcttattattcaataaaattaatgatcgatatatgtcagacgtaaaacaagatttcattttccataatgaattacctcaagactctttgatgattattaaaacattgaatcatgaacatggttcaattcaacatttgcttccaataagcgatcaacttgtttatatagaaaaagaaattttagatgaattagacaaaacgaattaccctaaaacggagcttgcagttcaagaagaaactggtcgtacatttgaactcaagttaaatcacgacgaggttaaatatatttgctttaaaccaagctaaatactaacagtcctcttgtgtttagtttcttacgttaaaggctatttatatcataaggagatgatttgtaatgagtaactcacaagcaattcaagcaattgaaaacgtgttagtaacgtcaaaagttggtgtattatcaactgcatataataataaacctaatagtagatatatggtcttttataatgatggtcttactttatatactaaaacgaatatccattctgctaaggtcaaagaaattaaagataatccagcagcatatgttttgttaggctataacgacacaactaatcgtagtttcgttgagatggaagcgacaatcgaaatcgttacagaacaagaagtgattgattggctatgggaaacacaagacaaaagctttttcagttcaaaagaagacccagagttatgtgttttaagagtagttccgcaatccattaagctaatgaatgataaatcattagatacacctatcaaaatcgatttataacacaaagtgtatataggaaataacttttatgaattctagatataacaatgttaaatacttaaaataactcgctataattaaagtgtttaatatgtttacaattcaatttgcaatgtattgttttttagacacactttattcacatttaacgtgattagggtgtgtctttttaaattaattttatgtaatataaatactgcatttgcaaactgttgcacttttaggtataacagaattaactacatttaaggagattgatgaaccatgaaaaagaaaaaaggttttggtcttggtattagtttaatcgccatcatgttaattgtatgtattgtattagtaatcatgatgatgactggcggaaagaaagatacatactatggaattatgaaagataatactactattgaaaaaatgattagtgaaaaagatgaaagtattgaaaaaaatgttaaattaccttcagattcagatgttaaagttaaaaaaggtgattttgtaattgtttataaattagcagattcagataaaattgttaaagttaaaaaagttgaccatgacgatgtaccacatggtttaatgatgaaaattcatgacatgggcaaaatgcacatgaaacactaattgtaatttaaattacaaattttagttgccatcaaggtatatacgagtaaaagcagcggtaagttgatttccaatttggaatcattttactgctgctttttatatttgaaatactttcatattgaatagctccacttgccgttcgcctgcgctttgcgcatgcataaaagcccctaacaacctgaggtcactgcgctccggttcgcctgcgctttagcgcatgcataaaagcccctaacaacctgaggtcactacgcttccgttcgcctgcgctttagcgcatgcataaaagcccctaacaaccaaaggttgtaaggggctttaaatgtcagatagtattttttaaattgattttaaatattcttgaccttttgctttgtcatatacgttttcccatttagctataacgattgttgataatgcattaccaataacgtttacacatgtacgtaccatatctaagatacggtcaacaccaataattaatgctaaaccttgtgccggtaagcccatggcacctaatgttgttaataaaacaacgattgaagttcctggtactgccgccatacctttagacgtaatcattaatgttaacatcaacacaatttgctctgataatgttaagtgcattccatacatctgtgcaacgaataatgctgcaatagattgataaagtgctgatccatctaagttaaacgtataaccaattggtataacaaaagaagtaatttcttttggagaaccgaagttttccattttcttcatcattacaggaagtacagcttccgaacttgatgtagaaaatgctaaaagcaattcacttttcaagattctaataatattcatgatattaataccacacatccatgcaactagtcctagtatagcgaatacaaagaacaccattgcaaagacaacaactaatactaattttaatagtggtaataatgcggatgcaccaaatgtaataattgtagtacaaatgaatgcaaacactccaagtggtgctaattttaaaattttattaatcatccagaacacagcttcaagcgatccgcttaaaaattctttaactggttctgcttttttacctacagcagctaatcctaatccaaagaatactgcgaagaagataataggtaataattcacccttatttaaagcttcaaaaaagtttgtcggaataatatgtacaatggtatcaataaaatgatttccatatgtagattgttctgctgcatgtgcagttgattgatatttagaaatatcacctttaggtaattttgttgggtctaatccagcacctggtttaaataggttaccgaagataatccctaaacctattgcgattgttgtaataatttcaaagtataaaattgttttccagccataacgccctacagttttcgattccccaacgttcgaaatagaaagcgctagtgagcaaaatacaactggtataacgatcattttaattaaatttaaaaatacgtcaccaaatggtttaatgtaatttgctacgttttcttgtccatataataaaagtcctacgacaacacctaacactaatgcaataacaacttgcataggtaggctaatttttctcttgaatagagccatagtacaaactccccttcatctgacatcactcaattatatcagaaaattgataattatctataaaaaattaaaatatttatcttttatagatgtcaaaaatcactaatttccatacaaaaactgtttacctcaaataattaaaattgaaggcactaaactgcttcaccagtttaacgtttcactattttgatggtttataattttgattgaaatatttatgctttgcagttttcaaacttttcttagtctctgtatcaaagccttcaacaaataatcctttattagtactgattggttgcacaacataagttacaccaggttcatctttaaatgtaacttccttatagaagagaccttttttagcactatactctgttttttctgatttaattttatcttttagatttttctcttccaagtaactgtcaattagttgaatattcttatggccttgatatgttttcagaccaaagaaaaatgctactgcaacaattaatgaaataaataatataatgataactttaatcgcgttttttttcttcttcattatgtaactcctttttgcttatctattcagtatgaacgaatcaatttatttaataaagagtttttaccagattgtaacaaatttttttattctcaatattattatagaaatcgaattacatacacgatgcttttaaaaaatttaataacaaattttattttactatctatcaaaataattgactacttttaacaattaaggatgatacaattacatttttttcaatttaaaaaatcagtcatatcagtaattaccgatgaaaatactaagatatcgatatattttgcattatttaacatttaaattcaattatagacaattcaataattgcgatgaaatcagtacttgacaactattacacttcataatattgtttattttaacaaggagtgattggatgtatgtagaaaacagctatcttagcaaacagttgtgttttttattttatgtttcttcaaaagaaataattaaaaaatacacaaactatcttaaggaatatgatttaacctatactggttacattgttttaatggcgattgaaaatgatgaaaaacttaacatcaaaaaattaggtgaacgtgtgttcttagattctggaacactgacaccattactaaagaaattagaaaagaaagattacgttgttcgaacacgtgaagagaaagatgaaagaaacctacaaatttctctaacagaacaaggtaaagcaataaaaagccctcttgctgaaatttctgttaaggtctttaatgaattcaacatttcagaacgagaagcatcagatataattaataatttgcggaattttgtttctaaaaattttgactattccgacaaaaaataactccctatcataaggtgatgggcagaagtatgcatcgatatgtttattcattatctttattgcttgtataaatctcgatgctcagttcttttgccctgattccttatcaggcacaaatctacccatttattacttttttatctccccttttactttaacttttttaatactactcatataatggctttgtaatacaaatttctataatggaagtgatgatattgaacttcaatcaattcgagaatcaaaacttttttaacggtaatccaagtgatacatttaaagatttaggtaaacaagtatttaattacttttcaacaccttcatttgtaacgaatatatatgaaacagacgaattatattacttagaagctgaactagcaggtgtaaataaagaagatattagtatcgatttcaataataatacgctcactattcaagctactagaagcgcaaaatacaaatctgaacaactcattttagatgagcgtaacttcgaatcattaatgcgtcaatttgattttgaagctgttgataagcaacatattactgctagttttgaaaatgggttattaaccattaccttgcctaaaatcaaaccaagcaatgaaactacttcatcaacatctattccaatttcatagttaaatttaaaatgaatacactactaaagccttaatgtcatgctacgaatattgcgcatgatattaaggctttgtatttaactaaatgaatggcatgtattacatatcaaccgtttttcaatgagccatattctttttggtataaatgacgcatggtaaataatgcaatacatccaaataccgctaagaaaataaatgctaaatgacttgatcctgttaaattagctacgtacgtgattactagtggtgggaagaatcctcctaaaccacccatcattgatacgataccatttgcggatcccgcttcatttaagaagtatgatggtactaatttgaagattaagccgttaccaatacctgcacaaatacttattgttaaacagcctacagtgaataatgcgatatggtctgaaatacctaaaataatggcaccgataatcataacaacaaaatcaatcatcaatactttaactgcattaaatttatcacctaaaatgccacctattggtcttaagaatgttgccagcgcaatgaatacacctgatcgaataccagcatctactttgtcaattccaaaatgatttactaagtagttaggtaagaaaataccaaatgctacaaaagcaccaaaagtaataaaataccaataacttaagtaatataatttgtagtttttagataatgttttcatttgagccattaatggtactttaattttacgttcttgtgtgtcaccaaaaatgaacataattaatgcaaataaagcgataataattaagtaacttctaactgttgtttgccaaccaataatacccgctatcggtggtgctaaaaatgaagaaactgctgtaccgatatttcccataccataaataccatttgctagacctactttttctttagggaaatatttaggaactgatgtaacaccaactgagaaaattgcaccacctacaccaaggaaaaatcctgaagccattaacatacccggtgtttgtgcttggcttaagaaaaatatcgggaataacaatacgataaaactagtaaagaatacccatttagcgccaacaatgtttgttaaataaccaaatggcacacggagcaccgatcccaaaataactggtatcgctaaaatgattgatatttgaccttcagtaacattgacatcttgtttaataaagggcattaatggcgcaattatactccaagccataaacccaaccactaaacttaatgtttgtaatgtaagttgaaagccaccttttgttttgtacatacgtttcaccttcatcaaaatcatttattttttaatagatatcaatactctgcctatatattagaggtcaatgttatttaaaaatgctttcatttatatgaaaacattcaatatagacaaagtattgactacatatatattttattatgattgtgaaaaagtgaacataaggattttcccttatttatgaagtgatttaccctatacaatgtccctttaagatgcttttagacacttattcgccatcattttaatcatattatttaggaacactcacatacttttcttaatttttttcaattagttacaattactgcttgaaaatcacgttacgttatcctttatgctgacaacataaggaggtttatcatgtataaaatcaatattattagatcagattccgtctataataatatactcaaggcaccaataaacgaccgtgattcaattttcactaaagaaatattagtaccttttaaaaagaaatttgaggtacaacatatgcctatttataatgatgacaaacagacaatgagtgcgattcaatttttagatgcctttcaaatttctcccaaagatttacgcatgtctgaccaaatgtcaatacaatacctgaataatgatttctggagtaattgcgaaaaatatttaaaagttgctatagatcaattttcaaattatagtatctcatctcaagtttctaactatcatttcacagtattacttggagatcgccaaaaaccacttatgtatctaaataaaaatcgcggtggtgatggtggcataccaggttatattatgatttatttagtgccgagtacaagtacaattaattctatgaaaagcttaattgcacatgaagtaaatcataatatgcgctatcaatatattgattgggatggcggaagtttgattgaattgattattgcagaaggattagctgaaaactatgtagaatcattgtatggtaaagcgcatattggaccgtgggtaacaaatactaattgaagtcgtgataacgtaaaaattaaaaatactatttataatcatttacatttaaagcatatatttgaatcgatgccttatctctatggtgatgatattaataaacttcaaggtaggcctatcgttggcttatctcatgctgccgggtatgcatgtggctatcacttggtaaaatactttttacaaaaaacaaacatacctattgaagttgctacaacacttccagcacaaaaaataataaatgaggtgactgaattttggcatacacatacactttaaaagatattattgaaattacaggtgtaactaaaagaactttacattattacgatgaaataggattattagttccagataaaaatgataaaaattatcgcgtttataaacagcaagacttagaaaaattacaaaagattttaatactcaagtcttttgattttgatatcgctaaaataaaacaatacatttcgtatgataatgaacaattgcgaaagttattatcagagcaaataagcaagttagataaaaagatttctgacttacaattaattagacgctctgtatgtgaatttattaaaggactctctctaatagataccagcattttaaacaagacactacagtcacaatatgataaagaagcatctataaaatatggtcatacgaaagcatatcaatcatttattagacgtaaagacagcttacaatcgcaggatatcagacataaattgacaactatcttcaataaatttaatcatatgtctttgagtcattatccaatccaagattgtagtgatctcgtatttgagtggaaggcatttatgaacactatcgctgattttgatgatgaaacattatgctgtattgctaaaacatatgaagatgatacgcgtttcaaagattactttaattcatatgataatcaaaatttagcatcatacatttcagaagctgttaattattttttgagcaatgtgaataagagcgacaatttttaatcctcatacagatgctacaacactgaatacaccaactaaaataattgttcaaagtagaaaactaatcatttattctctaaatcaataactatattaaaagttatacctttgcaaagcgaattagtataggttaccgaaaggagaaaggattaggttccattcgatttataaaaaaatatatttcgaaacatacaaaagcgccagaagataatcatttcctctcgcgcttttatactgaattatattaatttcaaactctaaaactctaataatttctttttcaatgcatattcaactagctcaggtttactctttaagccaagctttgtcataatatgcgtcttatgtgcttctactgttttcacagatacaaataatttctctgcaatttctttattcccgtaacctttggcaataagtggcaatatttctagttctcgttttgataagattttaaaaggatctgttgtgtttgcagtgtcctgatttgaattagatacaaattcattcactaaagatgttgtaagtttcatatctacatatgtttcacctttatatacagttcgaatagctaacaataattgttcatcaggtgcatttttcaatatgtaacctttcgcaccattacgcaacacatggaacaaatactcctcatcatcaaacattgttaatattagtattttagtttcaggaaaactgtcagcaattttactcgtagcgataagacctgactcacctggtggcatacttaaatccattagtaacacatcaggtttatattccattactttttggtaagcttcgacgccatctgcagccgttgcaacaacttccatatcattttgataatttaaaatcatagagaaccccgtacggacaacagcgtgatcatcggcaatgactattttcaattttattcccccaatgtatgtttcaaattggaatgttcaatgtaacattggtaccctcaccaattttcgtttcaatattgacgctaccgctgactaactcagctcgctcattcattccatataaaccgagtccagaacctttaggcttagaacttggatcaaaaccatttcccgcatctatcacttctgctaccaaatggcgcccagtttgacggatacctacatttatttcatttacatcagcgtatttcaacgcatttaaaatagcttcttgcactactcgataaacaaccgtttcaatatcactatcaaagcgagtatttttaatatttgatgtatatatgatttttattccataattttcttcaaactgtttaaaatatgatttaaaagctgcttcaaggcctagatcatccaaagaagcgggtcttaattcaaccgacatattacgtatatcatcaattaatttagcgacaatatattcaatattttctgcgtcttccaaaagcttagttgtatcttcttgatattttaataatctcaattgaacatctacattgagcatttcttgaatcacactatcatgtaactctctagaaattcgctttctttcattttcttgggctgagattgttttacgcatcatacgttgttgatgcaatttctcttgctgttcaatttgtgatgaaacattttgaagcgtaaatgcatgaattcccctgtcttgatcaatcaactgatatgttgctgtaaatggcatcactttttgatctttcgtcttcataaatacttggaaattcgtagcttgtacttgcatcgattctaagaaacagtctttacatgattgtacatcataggcatttgtatacccttcacatctgtgacaaatcgcattcgccacagcactgtaattatcttcttcagataatatatctttagcagcatcattcattgcaataattttaccgttatcatcagcaaaaactatcttttcgattgaatgctcataatattttttcaataaagtatctaactgtatactgtcctcattaatcatgacttacaccctaattcatctcattatttatcatcattgaaaataccaaacttacgttgaatatcatcattatcaaatatttttggtaaaggacgaccatctctttgaccaaataatagtacgccatacacttgattcttataccaaagcggcactgctaaaactgctgttaatgattcgctcaataaaattggatagtcaatcttttcttcaggccctaaagctaaaccaacattggctattaccatacgctttcctgttttcataacagttccagctaatccacgaccttttcttaaaataatcaatttaaatcgattatttttattacctgaaacatagtgccattttattggagatgatggtttgttagattcatagaaagcgattgccgcaaaatcataaccctcttctttgcgtattttatctaatgtctcttgaaatctacgatcttcaattattgcttctggtgtcaaatcctttcacctcttatgcttacactttattcttacggtaaataatatatctgcgatttatatatgtcaaaggtacactccaaacatgcaccaaacgtgtaaatggccaacaagccataatagtgaaacctaacaatatatgcattttaaatgcaatcggcacaccactcatcaatgacgcatctggttttaacataaataattgtctaaaccaaattgataatgaagttctgtagttaaagtctggatgttgtatatttgttactaatgttgcgtaacatcccataaatacgataagtaataataagaaatttacaaatatatccgacgctgaacttaatcttcgaatacttttcgtagtaacacgtctcgctgttaataaaaacatccctatcaaagttattataccaaagatgctaccaatataaacagcgcctatatgatataaatgctcagacacacccactgcatccatccatggtttcggtattaacaatccaactacgtgtccaaaaaacactggaataatacctaagtgaaataataaacttccccacatcaacctttttctttctattaattcactagatttagctgtccaagaaaatttatcataacgataacgtgcaatatgacctgcgacaaagacaactaaacataaatacggaaatataacccataaaaactgattaagcatgatgtttcactccttttggtgatgtcaaacataatttcaatgtttttctaagtgcttgaatcacataggcatatggattgttatcttcaccaagtgcattcgccatcacatatgttccatcctcaataatcataatgattaattgaatattctcttcagctcttggatcatttcgccattctgccacttgcaaaaattgaagcatcaacggtagataatcagaaagttcattatctaccatttctagtccaaacatttcatataatacctttaatttagctaacatttgcccacgttctttttgcgtatcaaatttgttatacgtcatatataatggtgcttttttcgtaaaatcaaatgtatctgtataaatcgctttgatttctgataatgaaaatgtcatcattacatttctaaatgctactaaatcttcatatgctggatgatctttcgaaattgtttcttcaaaagtttttggatgaaaagttaatttttctggaaaacataactgttgtgccatatatccaaaactttcttgatattttttaaaattatcgaaattaatcacggaaaatccctccatagaaattctcattataaatttcttgaccagttttccctgaacctactgcaacgccacagccttcacagttatctccaaaatgctcgccgccgtaattgtatcctgtactaccttgtgcgtgatacgtatctaaataggtttctttgtgtgatgttggaataacaaatcgatcttcatatttggctagtcctaataaacgatacatgtctttagtttggcgctcggttatacctaatcgctctaatcgagacgtgtcaaatggctgttgagtaacttgagatctcatataacttctcatcattgccatacgttgtagggctccttttactggctctgtatctcctgcagtgaaaatattagctaagtattcaataggtaaacgcatttcttcaatggctgggaaaatcgcatctggattttgagttgtatttttaccttcaaaatagctcataattgggctaagtggtgggcaataccaaaccatcggcatcgttctaaattcaggatgtaacggaaatgcaagtttatattcaattgctaacttataaattggagagttttgtgcagcttcaatccaatcgtaaccaataccatctttttcagcttgagcaatgacttcttcgtcaaatgggtttaagaatatatctaattgtttttcatataaatctttctcgtctactgctgaagctgcttcatgaactcgatctgcatcatataataaaacacctaagtaacgcatacgtcctgtacaagtttcagagcataccgtaggcatacccgcctcgattctcgggaaacagaaagtacacttttcagctttgttcgttttccaattgaagtaaactttcttatatggacaacctgtcatacagtaacgccatccacgacatgcgtcttggtcaactaatacaatgccatcttcatcacgtttatacatagcacctgaaggacacgatgcaacgcaacttggattcaagcaatgttcacataaacgtggtaaatacatcataaaagtttcgtcaaattggaatttaatatcttcttctattttttggatgttaggatcttttggacctgtaacatgaccacctgctaagtcatcttcccagttaggtccccattcaatttcaatgttatcccccgtaatttctgaatacgctctagcaactggcgaatgcttccctgatttcgcagttgttaaatgttcataattatagttccatggctcataataatctttaattaatggcatatctgggttataaaaaattttacctaaagcaatttttgaaattctacttccagattttaattcaagtttccctttacgatttagtacccaaccacctttgtagtgttcttggtcttcccaacgtttcggataccctacacctggcttcgtttctacgttgttgaaccacatgtactcagcacctggacgatttgtccaagtgtttttacatgtcacactacacgtatggcatcctatgcatttatctaaatttaataccatcgcaacttgcgctttaatcttcaagccaattaacctccttcatctttctaactgctacatataaatccctttggttcccaattggtccataataattaaagtgataactaatttgtgcgtatcctccgactagttgtgttggtttcaaatggattctagtcggcgcgttgtgtgaaccaccacgtgtatctgtaatttctgacccaggcgtttgaatatgtttatcttgtgcatgatacataaacattgtacctttaggcatacgatgcgaaataactgctcttgccgttacaacaccattacggttatacacttctagccaatcattatcttggatatcgtgtttttcagcatcttcatttgatatccaaaccgttggaccacctctaaatagtgtcaacatatgcttattatcttgatacattgagtgtatattccattttccatgaggcgttaaataacgcagtaccaaagcatctgtaccacctttaattttcttatctctattcccaaataccattggcggcaatgtcggtttatatactggtaagctctccccaaattgttggaaaacttcgtgatccacataataactttgacgtcctgttaatgttctaaaaggtactagacgttctatattcgttgtaaatggtgaatatcgtcgaccttgtttatttgaacctgggaatactgctgtcggtattacttctcgtggttgtgaagttatatttaaaaacgaaattttctcagcagcgcgttcgctagaaatatcttttaacggcattccagtttgttcttcgagatcttcatatgatttttgtgataatttaccattcgtagcagatgaaatacttagtattgcatcagctacattacgtgctgtatcaatacgtggacgattcgctctcacagaatcatcatttgtatcactccacgtacctaacatactttttaattcttcatattgttcactgacaccgaaacttacaccatgtgctccaactttccctttttcaagtacaggaccaagcgtgacatatttgtcgtaaattttagtgtagtcgcgttctacaattgcaaagttaggcattgtacgtccaggtaccgcttcaatttcacccttcgaccaatctttcactacgccgtatggtgttgaaatttcttgctttgtatcatgactaagtggagttgtcacaacatctttaaacgttccaggtaaatagtcttttgccatttctgaaaatgcttttgccaacgttttataaatatcccagtctgaacgcgattcccataacggatcaatggcaggattgaaaggatgtacatatggatgcatatccgttgatgataaatcatgtttttcataccaagtcgctgccggcaaaacaatgtcagaatataacggtgttgccgtcattctgaagtctaaagagaccactaaatctaacttacctgttgtttcttcacgccacgtaatttcttctggcttttcatcttcatttggtgtagctaataaccctgattttgtgccaagtaaatgcttcataaagtattcttgaccttttgcagaacttgaaattaagtttgaacgccatataaataatgattttggatgattctttttcaaatcaggatcttctattgcaaattgtgtttgttttgatttcacttcatcaattgcacgttgcaaaatcgcttcatttgaatctataccttcatctttagcttcttctgcaaacaacaaactatttttattaaattgtggatatgatggtaaccaaccaagtctagctgctaaaacattataatcagctggatgttgatgctttaactcctctgttttagctaatggagattttaaacgatctacatttgactcttcatatttccattggtctgttgcaaaatagaaccaacttgttccgttttgcaaacgtggtggtccttgccagtctttcgcaaatgcgacagtactccatccttcaatcggacgacatttttcttgtcccacatagtgagcccaaccgccaccattcacaccttgacagccacataacataactaagtttaagattgaacgataaatcgtatctgagttaaaccaatggttaatacccgcacccatgataatcattgaacgcccttcagtatcgatagcgttttgcgcaaattctttcgctacttgaatgacaacactttgttttacgcctgaaatggcttcttgccaagcaggtgtatattttgattctgcatcgtcgtatccttttgattctaatttatgatcaaaacgacgcacgccatattgacttgccattaagtcaaaaattgtagcaatacggactttgtcaccatttgctaaagtgacttgtcgagttggaattggacgattgaatatcccatctccatcactatcaaagtatgggaattgaattgtttctaattcgtatccaccttctgtcattgataatgtagggttaattttagaaccatcttctgtttctagttttaagttccacttcttaccttcttcccaacgttgacccattgtgccattaggtactactaaactatcgctgattgcatcatgaataactggcttccattcgccttgctctgttgtttgacctaagtcactcgctcttaaaaatcgacccgctttatatccattttcatcttcatccagcatgataagaaacggcatatctgtatattgtttagcgtaatttataaagcgttcattaggttgattaacataatgttcttgtaaaataacatgcgtcattgcttgtgcaattgcagcatctgaaccaggattcggtgctagccagttatctgcaaatttcacattttctgcgtaatctggtgctactgaaatgacttttgtacctttatagcggacttcagtcataaaatgtgcatccggagtacgtgttaaaggtacattagagccccacataataatgtatgatgcgttataccagtcacttgattcaggcacatctgtttgctctccccaaatttgtggagaggcaggtggtaaatctgcataccagtcataaaaactaagcatttcaccaccaagcaaattgatgaatcgagcacctgctgcataactaatcattgacatcgctggaataggtgtaaatcctgcgattcgatctggaccatatttttttattgtatacagtaattgtgctgcgattatctctgtaacgtctttccaatttgaacgcacgtgccctcccatacctcgggcttgcttatattgtttggctttgtcttcattttcaacaatagacgcccatgcagcaacgcgattaccattgttttcttctaatgcttcagtccataaatcccagagttttccacgaatatatggatatttgattcgaagcggactgtattcataccaagagaatgacgcacctcgtggacatcctctcggttcatattcaggcatatccggaccacaacttggatagtcagtttgttgattttcccaggtaatcacaccatttttcacaaatactttccaagaacatgagcctgtacagttaacaccatgtgttgttcttacttctttatcgtggctccaacgttctctgtacattttttcccattctctacttttactttctaggatcgaccaattcccattaaatttttctgttggcttaaagaaattcaatccaaattttcccatatttatatcctcctacgtataaaaatacgatgtgtagatgtcgtgtttttaaatactttaaaatgcccaagactattgctttaattagattgtacattttttcacaaacataaaatattagggaatcacctaattacttaaggaatttccctatcaataacgggatttcattgaaataatacacaatcatgtatggtcatgcttattgccaatctaaatcgttcaaatttggcacaacgacaaataaggcttcaacacgaatatattctctcggttgaaaccttacttattcatttattttttataaattagtgacataacactgtattagcatctgcacgatcggttgaaatatatgttacattttcttgctgcttaataaatgcatcatagtaatcatattgcgacgaatgatatgtgccattcgatgtatcatttgggtttagcaaacagccataaccttcgtcatataaatgttcacagagcataagggcgtcatgtttagaaccacttactacataaaattgcttcataggatcatatgatttaggagtgttttcagtataatcaacaacttcccctataatacatatacctggtttcgcctcaattgaatagtgttgcaattttgaaataatattacttaaacgccccttaacaacaaactcgttaaaacacgatgcttgaaagacaatcgctatcgggtaatcaatatctgtgtattgttgtatctgtgtgataattttccctaaacgttttacccccatataaattgctaacgtgccaccattcactaaggaattgacatccacttcattttcttctgaatctttaaagtgacctgtagaaaatgtcacacttttagcaactgtacgcattgtcaaacctgtctgcatagtagcaactgctgcgctcgctgatgtcacccctggtacaatttcaaacgcaatatgatgttcatttagtatgtcgacttcttcttgcacacgaccaaatatcgctggatcgccacctttaagtctaacaaccttgttatatcgacgcgctgcttccacgatacagtcatttattttttcttgctgaatatgttttgcatacggctttttaccaacatcgataatttcagtagtcaaattcgcatattgtaaaattaacggattcactaatcgatcatatagaatgacatccgcttcacgtattaaacgctcagcctttttcgtcaaataattcggattacctggacccgcacctatcaagtaaaccttgccatattcctctacagacatatatatacgttcccgtctgtaacttctacctcataaacatctacacaaccttcatcaggttcttgaacaatacctgtatttaaatcaattttttgatcgtggagcgggcaaaatacatattccccactcactgtcccttcagacaatggtccttgtttgtgtggacagatattgtgaatcgcatgaattttgccactttctgttaaaaacaaccctacctctttgcctttgacaataaccttttttccaattaggggtgttaattcatctatagttgtcactttaattttttcttttgtttccatgtattacaccttctccacttcaaaaattctacgtgcttgagcattgctagttattgcttcccaaggttcagcttcgactgcttttttagcatccataatgcgttcaaatagttcattttgtctttctgggtcaagtaagacttcttttacattttcaaatccaagtcttcttaaccatggcgctgttctttcagcatatatacctgtttcgcgataatattgcatcaaagcaccacataatttgattacttcatcttctgtttctacagttgttaaaaattcagctttttcaacttctgtaccaccattaccaccgatatagatttggaatccattttcaactgagataataccaaaatctttaacacctgattcaacacaacttcttgggcagcctgatacacccattttgaatttatgaggtgtatcgatgtattcaaatgttttttctaaacgaatgccaagtcgtgtcgtgtattgcgtaccaaatcgacaaaactctttaccaacacagcttttaactgagcgtgttttcttaccataagctgatgctgaacgcatacctaggtcttcccatatatttggtaattcttcttttttaactccatacaaaccaacacgttgtgaacctgtcactttaactagtggcacatgatatttcttagccacttctcctagacgaatcagttggtctgcatctgtaacacccccacgcatttgaggtataacagaaaatgtaccatcattttgaatattcgcatggtaacgttcgttagcaaatcttgattctctttcatcttcatgatcatgtggataaaccatgtttaaataatagttgattgctggtcgacattttggacatccacctttatttttaaagtttaaaacatgtcgaacttctttagatgtttttaaacctttcgctcttatttgcgttactatttgatcgcgtgtcaaatcagtacaaccacatataccagcaggttttgcggcaacaaagtcatctcctaaggtgtgctgcaatatttgagcaatttgcggtttacatttaccacatgaattccccgcttttgttttagccgttacttcttcaactgttgtaaagccattttccgtaatcgcatttactatagtacctttatcaacaccattacaaccacaaattgtttcatcatcagccatatcagcaattgatagcgatgcctcttctccacctttagtaagcaatgatacaagtgtgtaatcttcagtggattcaccttttttcatcatgttataaaagcgtgaaccatcatcgatatcaccatatagtactgcaccaactacattaccgtcttttaaaaagatttttttatagttattatcaacactattaaatatttcaatacctttaatttctgcattttctacaatttgaccagcactatacaagtcacacccagaaacttttaatgacgtaaatgttgttgatcccttgtatccgttcgtttctttatttgttaaatgatcagctaatactttaccttgttcatatagtggtgcaacgagtccataaactttgccgttatgttctgcacattcaccaactgcatatacattgctatcacttgtttgcatcacatcattgacaacaataccacgattaacatctagacctgattctttggctacttctgtgtatggtcgtatacctactgccataacaactaagtctgccggaatctcgcgtccatcagccaatttaacaccctcaacatcatcttctcctaagatttcagttgtgttggcttgcatttcaaacttcataccttgcttttctagatctgctttaagcatatttccagctttacggtctagttgcatttccatcaaccattcagctaaatgtaacaccgttacttccataccttgatctaataaaccacgtgcacactctaaacctagtaatcctccaccaattacaattgctttctttttagtcttagcaatgttcatcatttgttcagtatcatcaatcgttctccaaccaattacactcggtaatgtcgaacctggaactggaatgacgaatgctttagaacctgtcgcaaaaatcaatttatcgtatgatacttcaataccatttgcagtagtaactgattgatttgctctatctacttcaattacaggatcatttgtaattaactcgataccatgttcctcataccactcatatggattcataattgtttcttcaactgtcattttattttgtaaaatatttgaaagcatgatgcggttatagtttggataaggttctttacctattaccgtaatatcatataaatcgttggcgcgctctaatatttcttcgattgttcgaatgcccgccataccgttaccaatcattactagtttttgctttgccataaaatatgcccctttactccataatatttatttcaaaaaaaggtattaatttttcgttagtgcttttatattttcattggaatcattaagctttctaatctatcgttaatgatttgctttaaaattgggtcgaagttaattgaaggtgtgaagtgtatatctgtattaataaccatgtcattcatttgctgcttcactttgttaacaagtcttccgtcatataaaaataatggtacgacaatcaatttttgataccgtttcgagatgctttctaaatcatgtgtaaaactaatctctccatatagcgttctcgcatatgtcggcttgctaatttgcaaattttgagcgcatatttgtaactcttcgtgtgccttagtaaactttccattaatattgccgtgtgcaacaaccataactccaacttgttgttcgtcacctgctaatgcgtcacaaatacgttgttcaattaatcgtctcattaaaggatgtgtgccaagtggctcgcttacttctacctttatgtctggataccgtcgtttcatttcatgaacgatattcggtatatccttgagataatgcattgcactaaagattagcaatggtacaattttaaaatggtcaaccccactttgaatcaacgtcgtcattaccgtctctaaatcctgatgctcactttctaaaaacgcaatatcatagtgatgtatatcatcttttactaattcagaaataaatgcttctaacgcttgattctgtcgtccgtgcctcatgccatgtgcaacaatgatattcccattcacatttaccaaccctttcacacgtattgtataccaaatcattttgtttttgtgaaaagaatcacattataatgtaaaatcagggaattccctgatgcctgtagtcatgcatattccttatacattttccctttttgttaaatcaaaaaaagcgaccgatatatgaatccctactcaacatttatttgagcaagcattaatatatcggtcgcttgtagtgtatattattatcttaaaatggtggttggcctaatattgtttcgtcaaagcgctcgggtatcaatactttgcgcatgatcacacctaaatcgccatcatcattttcatgttcgctgtatatttcataacctcttttttcataaattttaagtaaccacggatgcaatcttgcagatgtacctaaagtaactgccgctgactttaacgtatctcgcaaaaatgcttcttcaacataagtaagtaattggctaccatagcctttcccttcatactcaggatttgtcgcaaaccaccagacaaaaggataacccgaaatacttttcacacttccccaaggatatctaaccgtaatcgtagatataatttcatcatcaattgtcatgacaaatgtagtatttttatctatattttctttaacagcatctaaattagcattaatcgaaggccaatcaatacctagttctcttagaggcgtaaatgcttcatgcatgagttgttgcaatttttctgcatcttgttcacttgcgagtcgaatcatcgtttttgtcatattaatccccactcttttttaaatgatttaaccatattttatttttaaaataaatatccatcaaagtgtatcaataaatttatcacatgtcagaaagtatgcttcatctgaatacaccaatactctcatgaaacttattaaaaattactctctcaacgtaaaaaaccattcaaattcatgaatggtttggaagaatgattcattgttacgctatttaatcactacatcttaattattgttgctctaaacgattacgcttaccatttaagaaagcataaacgagacctacaaaaataccgccaccgacaaagttacctaagaaagcaaaaacgatattttttaaaacgtgtaaccatgaaactgcatcaaggttaaagaataccatacctgcatatagacctgcattgaacacaacgtgctcatatcccatgtatacaaagaccacgacaccacaagctatgaagaatgcctttgttaagccgcctttgaattgcatagagatgaaaataccaatattaataaagaagttacagaaaataccttttgtaaaaatattcaaccatgttgaatcaacagtctttttctgaactaaagctgttaaagcttgtgtcatttcaggtgtcatgacatgcgcaaatttcattaagaaaaataacacaaacccacctaaaatatttcctaagaaacaatataataaaatccaagtcatcttcttaacagaaacgactttataataccagcctactgtaaagtacatgaagttacttgttaataattcagagttagttaatacaactaaaatcaaacctaaactaaacgcaatggctcccattaaattgataagtccatctacgtgagtactcgcaaactgcgtctttattccgaacataaatacagtaacgattgagagtaaaaatccggccatcattgctttaagcatatatcggccaggtgtttgctgtaccattacttgcttcatttgtactgaagatgatattgaatcaacaattgcgcctgttgaatatgtatcttcaactgttttcttattttctatcacagtacttcccccatttactttgatcaaataaaatttactttctaattatattagtaaatcaatgtaattgatagattaaatttcagaaaaatctttttattctctcgaaaatgtagttttctttcataaaaacagcgagataaatcgcgtgattggctaatatctttatgatttaagatattacgacgctcattttatctcgctttatgtaaagtattacttattcttttttaaatttgaaaagtaatgtaaaccatatgcaaatacactgtaaccaattgcagtacgtaaaataaaccttataactttattaggtacacattttgacgttactgaaatagaagatagtagtgttgtgaaaatatataatattaaaactttgatataacgttctaccatcgaatcatccctcatttttataatattacaagattattataaaccgaatgaaacaaaaaagtttttacatattttcaacaactttatttcaataaagcatcaagttgatctaaagtttgattcataccttgttcaacacccatgtttatgacttgttgagcggcttcttttgttggaaataccgatgttgatgtcactgtcgttttcgttgtattgctcttggaaaatgacaaagtaattttcatgcttggcatttttgtatcttttgcaccttgaggtgtcgcaaatgagtcaatatattcaattaaatatggacgcttaaccgttttatattctgctaatgtatagctggtcattgtaggtgttttaatcgcataaaatgcatcaccgcctgaaacagcattaaagcgaaacactttggtactagcgtcttttggatgaaaccatttttcaaataatgcttttgtcgtataggcatcaaacaccttttcaatcggtgcttctatcgttcttgaaaaaataattttattatcttcaactttaatcgtcatcttcccactccctatcttttatatttactcatcttaacatgcattgagtaacatatgttaccaaatcatttgttataaactatagtaatattaatcattccctctgttgaaattgataactacgaaataaaaaacacactctattcagctattaacagttgagtagagtgtgcaaacctgttgaattaatgcgctaacatttcttctttgatttggtctttatttaattttgaaggataatatgttggccagttatccatttcttttaataacgcgtcattatcattacccataaagatatggaagtgttctgcctttttaggtgcaatgttgtgatcgctaaattggatgaatttcggtaagtctttatcattaccatcgaccaatttaaacataaatctcacgccacggttacctttaggatatttcaatgttttcttaccattgtattcatatttaccagtgtgtttcttaccatctttagtaaatgtaatttcatttccttttatatcaatgttagtaatatcagttttatatcctttgtcataataagcttttaaatctttagcagatttcttcggatcattttcagctttatgttccatcacttcatcaagcgtaccgtcttttaagtaagggtaaacagattgccattcaccagcataatcgcttaattcacggtctttaacttgctcatctttaaaatacccatcagaaattgctttgtcatgtttactttcagctttgtcgtctttcactttaacaccactgtctaaagctttaccgatattttcaatattagatttcattaatgattgatacgtaatattatcttttttctgttgttctttatttaaagactccatgttgtagaattttaaaggcttcgcatctgtttctttacgaattgtttcagtcactttattcgcaacattatcttcgtaaagaatatatttagcattgctatctctaatttctttaacaattttagttaattctttttgtgatggatcttcagcattcatgttttgaatacctttttgaacaaaaccataacaatcagctaagtatccaattgattcatgtgaaatgaatactgcattaccttgcttatcttttgtaacttgcttcatatcgttatcaattttcttaagatcgtcgtttaattttttgtagtttttctcatagtcatctttatgttttggatcttttttcactaattcatctttaatttctttagcgaaagtttggttaattttaggatctaaccatacgtgtggatcatatccaccatgatgatgatgatgttcttctttctcatgatcatgtccctcatgttcatgctcttcaccatgctcgtgttgatcagttaaaagctttgctttatctaatttatcctctaaagacagttttttatctttatctttgatagtagatgcaactttcttagcaaccggatctaaattatcccctgtatacataaacaagtctgacttgcttgcacttaatatatctttttgtgttggttcatagctatgtaaatctgtccctgctggatagattgatgataccttcacgtgttttccaccaatttgctctgcaaatgattgcaatggataaactgtcgttttaattgttaccttgccatctttatcttttccatcatcattcccacatgcggctaatgataaagttacggctggtacaagaagtaacatacctaatttctttttcatagtcaccctcctaaatagtaatctttacgttttaaaattatatactcatgctacttaaaatacaagcactgtttttataaataatataaagtcgaatcatactttaggtatttaccacttttcgttttatctaatacatgactattgtacaaatatgatacagaaaactttatagtatttacgaacgtcataatataagaaaaaaagacaatctctatcatattgctaatagaaattgccttttcatattgtcctaaaataacttaccctatttttatagtgtgacttttagatttaataatggtatttacatgatgctatttttatatgattgtcatctactgtataaaccaatctatgttcgtgattgatacgtctactataatacccagtcagattcgattttaacttttcaggcttacctataccttccaatgcaccatttctgtcaatacttttaagtaactcattaatcttcttcaccatttttttatcgttctgctgaaaatacttataatcttcaaaggcttgaggcgaaaacgtaatatttaacctagccattatacatctatatctttcgttatagttttcccacgttctagatctgcaattgattgagctaagtgttcagcattatttgggttctgttggaggtaaagtgtttccatcatggagttataatctgattctgacatgattactacgtttttatcatcagtagatgttacagttaccatatcactatcatcatttacttttgtcataagtgcctttaaattctgtcgagcgtatgaataatttttaataatcatatttatcgcctccttttaacacacctcaattgtacaaatatctgtacaataaaacaagcgacacagaaaaaaactactaatcaagatttcgcacggggaagaatcaatacctatcctgtactgattccctactaaacaatgtttacatgataatttccacctatttagacttcatacattaaaaagacaatctctatcatatcgctaatagaaattgccttttcgtattgtcctaataaattggtatcacttactgatctcaacaattaagactatttgattttatcttttaataacttctcataactttcataatcatatggatcttcaactttctcgccattaataaatgcagttggtgtcgtttttatatgattatctttcgctatttttttatctttctctgcagctttccaagacttgctatcttttgtcttgtaatcttttataattttattttccgtctctttatctaaatgcagttgtttaatatgtttatctaatagttcttttgttaaccattctttattttcatcttgctgggcagcaaataattgcttttgaaaatctaaaaatgatttaggtgcatacatcaatactgcatgactcgcacgcgaaccaacaattgagtctttacctaagaaagctaaattgacaaattggtattccactttgtgattatctatataatttttacgcaactttggcatgactttttcatctaattctttacaataaggacatttatagtcgccatatacgacaactaatggtttgccgtttttcgaagatgtcgttgctgattcttttttaccgcaagctgttaaaattaacatgctcactataaataatgttagtaattttttagtcataataactcctattcatatctagttcgtcatattttcttcatgataatccgcatcatgttgttgataatatcgtctcgaatcaaaatcttgcttatatgatacacgtttatcactaaaatcatatgcataataatgcacttcatcatcattactcaaaggtttataagctaaaatgataattttatccttatcatagacataaatattagcatctttgcgttcaaaatgatcaacacgatcaccgttgccttttttggcaagttgttcttgtttttgattttgaattttaactgcttcatctatttctttcacatatttatcattaccacatcctgatataaagactagtaataataataccgtcgccacaaatcgcttcaatgctcccactcctactatcaacttccaactaactttcaatataattaatactatacaccgtcaaacattaatgcgctacaactactaccaatgcatttaatataaatatccaaagaaataacagttatgtatagtcaaagaaaaatatatttcattttctatgtgtatttgtaatcagtttttgataaaataaaaaaatagcattattaataaattcaaaaattatagttcaattcagagagggatgggataaaatgaactttgtaacgttgacttcggatgagttcaatgcgtttacaacaaagcatttttcacattacacacaatcagctattcattacaatcatagagttgatttaaaaggcgatgtgcatcttgtaggggttaaagatgacaatggtcaagtgattgcaggatgcttattgacagaagcacgcacacttaaatttttcaaatatttttatacacatcgcgggccagtgatggattatacaaatcaatcattagtagcatttttctttaaagcattaacgtcatatttaaagaaacacaattgtttatatgtccttgtagatccatatttaattgaaaatttacgcaatgcagacggtgaaattgttaaatcttatgataaccgagcatttgttagaacaatggataaattaggttataaacaccaaggtttccctgtaggttatgattcaatgagccaaatccgttggctgtcagtgttagatttaaaagataagactgaagaccaacttttaaaagaaatggattatcaaacgagacgtaatattaaaaaaacatatgatattggtgtcaaaactaaaacgttaacgattgatgaaacgcaaacttttttcgacttattccatatggctgaggaaaagcacggtttcaaattccgtgagttaccatactttgaagaaatgcaaaagttatacgatgaccacgccatgttaaagttggcgtatattgatttaaacgagtatttaaaaacgttacaattaaagcaacaacaattaacagctgaactctcaggtgttgaagaagcattggaagaaagtcctaattcaaagaaaaataaaacgaaacgcacacagctagaacaacagctaaatagcaataagcgtaaaatcgacaatacaatagaacaaattgaacaagatggtgcagtcttaaacttagcttctgctttatttatctacaatgagcatgaagtttattacttatctagtggttcaaaccctaaatataatgcttatatgggtgcctaccatttgcagtgggaaatgattaagtttgctaaagcgcatcatattgatcgctataatttttatggtattaccggtgacttttcagagtcatcagaagactatggcgtccaacaattcaaaaaaggttttaacgcacatgtagaagagtatatcggtgactttattaagcctatcaaaccattactatataaggtacaaacgtacttaaatcataaacgtcgttaaaatatcgctccaagattatgacaacataacaaagaaccacgcatcatgtatatggcttcatcgccatactaaaacatgatacgtggttctatttgattattcttcatttataacatttaagaaacgtcttaattcttctgttttcggacgattgaacatctcttctggagccccttgttctccgatcatgccttcatgaataaatacaatgttattagatacttctttagcaaaacgcatttcatgtgtcacaatgaccattgtcatgccttcattagccaaatctttaataacctttaaaacatcattcacaagttcaggatcaagtgcagatgttggttcatcaaacaacatcactttagggttcattgctagtgctcttgcaatagcaacacgttgttgttgaccacctgataatgcatgtggacgttgatctttgacatgtgttaaaccaactttctcaagtaactcaagtgatttcccacgtgcctcatcctttttcaactttttaactgtgataagaccttccattacattttctaatgccgtcttatgcggaaaaaggttataactttgaaataccataccagactgtttacgaacttctatttgtgattttttatctttagatgtatatgttttgccgttaacataaactgtaccttcagttggaatttctaatgcattaatcatacgtaacaatgttgttttacctgaaccagatcgaccgattaaggttacaacctcaccttgttcaacagataaatcaatacctttgatgacttcaacatcattaaatgatttatggatattgttcaattgaatcatgagcgataccctctttcaatataagattcatagataccttggataattgaaataataaagcataccacccagtacattagcgcaactaacacataaattgttaaatattcatatgttgtagacgcaacttcttgagcttttctaaacatttcagccactaaaataaatcctaataatgatgtatctttgattaaacttaaaaatgtattacctagtgcaggaatcgacactcgaattgcctgcggtaaaatgatacgttgtatcgtttgaccatacgtcataccgatggaatatgcagcttctgtttgtcctttcggtatagaaataataccgccacgaataatttccgaagcatacgcacctacatttaatgataaaccaataatagcagccactacaggtgccaatgtccattggttgtcagcgtcatttgttaataatctacctaattctggaataccataaaatatgataaatagttgtactatcattggtgttcctcgaataatagatacatagacacgtgaaatacttcttaaaattttactcgttgaaattcgcattaatgctgtaaataatgcaataatcaatcctaaaacaaatgtaactaatgtaataggaattgaatatttgaccaaaccttctagcataggtccgaaagcttgttttgcagcatctagcgcatgttgttgttcgctatttagatttagaaacatcttgaccaaaccatttcttacctattttagctaattcaccgttttcctcgatttttttcaagccatcattgaatttttgaactgtttcatcatctgcttttttagaaaatgcaaatgcagatctactttgttcagcattacctttgattgctttgatcttagcattaggtttttgttttttataatccaagtatgacagactatcattaaatgtaccatcaacacgcttagacaataataaatccattgattggttaaagccatcaacttttgtaatatcagcacctttatccttagctaatttaccataattagatgtgaatgtttgtgctaacttcttacctttaacatcatcaaaatctttaatatctttttcattttcacgaataactaaaacagcacttgagaatgtgtaaggcttagaaaatttatatttcttttctctatcaggattaatacctacttggttcgcgattacatcaaaacgccctgcgtctaaacctgcaaacatagaatcccaagaagtttcattaaatttaagttttaaaccttcttctttagccactgctttaataacatcaatatcgtaaccagttaatttaccatctttatcgtggaaactaaatggtgcataagtcccctcagtcccaacattaattgtcttgctatctttactagcttccttgtctttcgacgaattgtttccgcatgcagccaatatgaaaacgaaagctatcatcacaaataaaagtcttttcatagaatatatctccttattcttattattctaatcggaataaaaatattttaatctgaaatgccggataagtcaatatgttgaacttttgctaaaaagctttatatagctagcaacttatatttattgacgagaatcaacttcttttttcttaccttgtaacataaatgaacaaaagaaactaacaactgtaatcaataatgcaaataaaaatccagcgtgataaccatgcaacatcgtatcaactttaatttgattcatcatatcaattttgttcatgccattatagtctgacatagttggagaaaagtttttgcttgcatgggataaaatagtaattaatgcagctgttccgatagaaccagcaatttgttgtactgtgtttgtcatagatgaaccatgtgcattcatttctggctttaattgattcatcgtatgggtcattactggaattaatcctaacgcgataccaaccattcgaatcgcataaactgttgccaacatgattgttgatgtttgttcatccattacaacaaaataagccgtagtaataacaacaatcgccatacctactaaagcaagatttctaggaccaaacttttcatataaagcacccgaagtcatcgacataaatgccataacaattgctcctggtaataaagttaatccagaatctaaagctgaacgatgcaataaattttgcacaaagataggtaaaatcgtttccgaaccaatcatcgataccattgtgacacccataataatgataccaactgtaaattgtttatttttaaatacagcaaaatttaataatggtgttgatagccgatattgacgtaatacaaataatgcgactaaaacaacgcctccaatcatagatactaatacgataggattatcaaaacctttttctgaaattgaactcgttccatacaataacccgccgaaacctagtacagaaaaaatgacagaaataaaatcaataggtactttaattgtagttccaacattttttatcgttttaaatccaattaaaaatgtcacagctgcaattggagcgacaacatggaaaagcgatctccagttaaaatattcaacaaggtaacctgaaagagtaggtccaatagctggtgctaaaccaattaccaaaccaaatatccccatatatttaccgcgttcatgtggttggaaaacatccaaaatcgttgtcatcatcaatggcatcataatacctgcgcctaacgcctgaataattctagcaactaataatgttgcaaagtgcggactcaagccgccgagtaatgtacctaagaaaaagatagaaatacccactaaaaacacttgtcttgttgtataacgttgtataacaagcgcggacaaaggaataacaatcccattagtcaataaaaaagctgttgtcagccattgaacttgtgtatatgaaatttcaaaatctttcataatacttggtaaagccgtcactaatagtgtttcatttaataatccaaaaaatccacccatcagcatagtaataatcatcgttaatttttgtttcttcgacatttaaagcttccccctcaccatctaaaaaacgacacacatttttagatatccggtaattatacccattttccaaaaaattagcacgactttattacaatttctttaaaacgtaatcattactatttacatatgagtagttatcggtcataatatatttacaaggagggatagagatgaaattagatttacagactgctcgtcgtaatttaaatagccctaacattaaaacaagaaagcgtgctttaaagattattaagcaacataaaagagcgaaataattgttttaatttgactatattgtatgtctaactatattttcgagtatccctagctcgttaatataaactctatacttaactatttccttacattacttcacatatttaagagctgcatatacactcactccttgtgtacatgcagctctttttttataagtagtatttatctataacttctaaatcatccgttaattcataaacaagcggtgcacctgttttaatttcataattaatgatatcttcatctgacacatcttcaagatatttaatcaatgcgcgaattgaatttccgtgtgcagaaactaataccgtttgaccatctagcaaatattgtgaaatatgatctgtccaaaatggtatcactcgaactaaagtatctttcagactttcagaataaggcatcatacgtttatctaaatgattatatcgacgatcagctaagtaagcttcacgttgttcttcggtttcagcaggtggtttcacatcataagaacgacgccaaatatgtacttgttcttctccaaattcttttctagcatcatctttatttaagccttgcaatccaccatagtggcgttcatttaaacgccagcttttatatacaggaatccattgttgtttagattcagttaaaatataatgcgttgtatctaaagcacgtgttaataacgatgtaaaagctacatcgatggcaatgttattttctcttactttttcacctgctctagtcgcttcattaataccttgttcagataaattaacatcttcccatccagtaaataagtttttagcattccactcgctttgtccatgacgacataaaattaattttggcataacttataacctctttcctttaatctttaggacgttatttcagggatattttaagatgatttaatcttagtaattttcttttcaatatattttaaaattcaatgattaaatcaattatcactagacattaaatacataaatcctattccccattttcattttttaattcataaatgaatcaataaccacctaataacaaatcatattatacacctttgttctctatttttctaaggtttaaaaaatatttttaggtaaacctaaaaatagatgtaataaaaacgcctcctcagatatttatatatctatgaagacgtttaaatacattatagatggtctggttctgggtgaacgtatactgaggaaataccttttttgtgcaaatgatgttcgacattgtcacaaatttgatgcgcttctactaaggaaaggttagcatctacaacaattgtgacatcaataaacacactacttccatggtaacgccctttaatacttttaacttcttgtacttcatcaacttctaaaatatcattgcgatacgcttctaattcagtttcattgaaaccatcactcaacataaaaattgcttctttaaaaataccaaaaccagtataaacgattagtaagcctagtaatgttgctaaaataatatcgacaattgggaaaccgatttgcgtaaaaattaatcctatcgctgttccaatgctgactaaactatccgataaattatctttggcagccgaatttaaagaactacttttcgttcttttcgctagtctttgattgactgcaaatacaatcaacattacaagaccactgattaagctgacgataattgttattgcgttaggtacaacgtcatcttctttgaacaaacgaggtgcattttgaataactacttggatacctacaaacataatgacaaatgacaccaataatgaagaaatattttcagacttcaaatggccataaggatgatttcgatcggcaggtttaattgaaattttcaatccaataataacagctaaagaaacgataatatctgtcatattgtttaatgcatcggctcttacagctgcagagttaaagacaaaacccgtgacatacttaacaatagataagattatatatacaattaaactcaaataagcaccgcgttgcgccaatttaagattttcattatgagacatgcgttgaaccaccttgaattagtatagtaacaatattatgaatgattcattttaattttacaacgtttttaatttttataaatttttataaaattaaactaatttattcattcgcaacccctaaaaataatttttagcctttctgcgaattttatgagctagaaaggcgcccaactctccctgtttgttaactttcgcctcgaaagtttctatgttgggaccctatgcattagtagcgaagctatctaatgtgttcctttattttctgcgaattttatgagctagaaaggcttatgcagttgacgttttacgtccaactgcgttcctccgtcttcttcaaatttatttgttagaaaggcacccaactctccctgtttgttaactttcgcctcgaaagtttctatgttagaaccctatgcatgagttgcgaagctatctaatgtcgtgaactaattatatagaagaaaaagtgcatcaatgacaaattaaatgagatttctactctaccaaactctcttcgaaagacaattttctcctctatttattagcaaactattgcatttctccatatagtacttccttacttaaaatacgctgaatgttctgaattaaacgcttttttacatagttaacactagttaatctattagttaacattagttaataattagttaatttccatttgtattctcatgtgataaattctaaaagcatacaataaatttaatatgtaaaaagaaagggaatacacatgaaaaataaatatatctcgaagttgctagttggggcagcaacaattacgttagctacaatgatttcaaatggggaagcaaaagcgagtgaaaacacgcaacaaacttcaactaagcaccaaacaactcaaaacaactacgtaacagatcaacaaaaagctttttatcaagtattacatctaaaaggtatcacagaagaacaacgtaaccaatacatcaaaacattacgcgaacacccagaacgtgcacaagaagtattctctgaatcacttaaagacagcaagaacccagaccgacgtgttgcacaacaaaacgctttttacaatgttcttaaaaatgataacttaactgaacaagaaaaaaataattacattgcacaaattaaagaaaaccctgatagaagccaacaagtttgggtagaatcagtacaatcttctaaagctaaagaacgtcaaaatattgaaaatgcggataaagcaattaaagatttccaagataacaaagcaccacacgataaatcagcagcatatgaagctaactcaaaattacctaaagatttacgtgataaaaacaaccgctttgtagaaaaagtttcaattgaaaaagcaatcgttcgtcatgatgagcgtgtgaaatcagcaaatgatgcaatctcaaaattaaatgaaaaagattcaattgaaaacagacgtttagcacaacgtgaagttaacaaagcacctatggatgtaaaagagcatttacagaaacaattagacgcattagttgctcaaaaagatgctgaaaagaaagtggcgccaaaagttgaggctcctcaaattcaatcaccacaaattgaaaaacctaaagtagaatcaccaaaagttgaagtccctcaaattcaatcaccaaaagttgaggttcctcaatctaaattattaggttactaccaatcattaaaagattcatttaactatggttacaagtatttaacagatacttataaaagctataaagaaaaatatgatacagcaaagtactactataatacgtactataaatacaaaggtgcgattgatcaaacagtattaacagtactaggtagtggttctaaatcttacatccaaccattgaaagttgatgataaaaacggctacttagctaaatcatatgcacaagtaagaaactatgtaactgagtcaatcaatactggtaaagtattatatactttctaccaaaacccaacattagtaaaaacagctattaaagctcaagaaactgcatcatcaatcaaaaatacattaagtaatttattatcattctggaaataatcaatcaaaaatatcttctctagttttacatcattttttaaataattttcgtaacaaaccgtgattaaaaagaaccgttgattctcaatcgaatctacggttcttttttcattttccatcaattaaatgcttcttcgctatttgtcagcccacttttttacctgcaacttgttaaataatccttacatcgttaacgaatagttcatcatttagttgaatcagctcaactttattaacttcatattttcacaaactattgcgcaatccattccttttccactacaagcaccataattaaacaacaattcaataaaataagacttgcaaagcatagttatgtagctatataaacgcctgcgaccaataaatcttttaaacataacataatgcaaaaacatcatttaacaatgctaaaaatgtctcttcaatacatgttgatagtaattaacttttaacgaacagttaattcgaaaacgcttacaaatggattattatatatatgaacttaaaattaaatagaaagaaagtgatttctatgattaaaaataaaatattaacagcaactttagcagttggtttaatagcccctttagccaatccatttatagaaatttctaaagcagaaaataagatagaagatatcggccaaggtgcagaaatcatcaaaagaacacaagacattactagcaaacgattagctataactcaaaacattcaatttgattttgtaaaagataaaaaatataacaaagatgccctagttgttaagatgcaaggcttcattagctctagaacaacatattcagacttaaaaaaatatccatatattaaaagaatgatatggccatttcaatataatatcagtttgaaaacgaaagactctaatgttgatttaattaattatcttcctaaaaataaaattgattcagcagatgttagtcagaaattaggctataatatcggcggaaacttccaatcagcgccatcaatcggaggcagtggctcattcaactactctaaaacaattagttataatcaaaaaaactatgttactgaagtagaaagtcagaactctaaaggtgttaaatggggagtgaaagcaaattcattcgttacaccgaatggtcaagtatctgcatatgatcaatacttatttgcacaagacccaactggtccagcagcacgagactatttcgtcccagataatcaactacctcctttaattcaaagtggctttaatccatcatttattacaacattgtcacacgaaagaggtaaaggtgataaaagcgagtttgaaatcacttacggcagaaacatggatgctacatatgcttacgtgacaagacatcgtttagccgttgatagaaaacatgatgcttttaaaaaccgaaacgttacagttaaatatgaagtgaactggaaaacacatgaagtaaaaattaaaagcatcacacctaagtaaacagttcaatcatcttaaaaaatcctgggacacttcatacttgtctcaggattttttaacaaattgaatcagcctcataacattaaattattttatcgtacattaaatttaataataacaactgatttttataagaataaagtatcgaaccatagtagatacacaaataatacaaatgaaacaatttaacttgaaagcttaaataaatattatcaagttaataaacaattaatttttagatggattcatcaaaaatcgtaaaaaagcacaatttgtattttacaaacattaattaaaaaagaaagcaagacattcgtgcaatcggttaccttaaattgtttacaactgtcaacaataccaaggttttattaactatatttctcacaaaattagcttttagcattccaaacaaaaaaggttaaatcgaacggaattatggcatttttaacttaattgtaaaaaaagttgataatggtcaattgttaatgaacagttaattataataacgcccaaaatatattattatttaattaagttaaataaaattatagaaagaaagtgaaacttatgcttaaaaataaaatattaactacaactttatctgtgagcttacttgcccctcttgccaatccgttattagaaaatgctaaagctgctaacgatactgaagacatcggtaaaggaagcgatatagaaattatcaaaaggacagaagataaaacaagtaataaatggggcgtgactcaaaatattcaatttgattttgtaaaggataaaaaatataacaaagatgctttgatattaaagatgcaaggattcattagctctagaacaacatattacaactataaaaaaactaatcatgttaaagctatgcgatggccattccaatataatattggtttaaaaacaaatgataaatatgtttctttaattaattatttacctaaaaataaaattgaatctacaaacgtgagtcagacattaggatacaatatcggtggtaatttccaatcagccccatcactcggtggtaatggatcatttaactattctaaatcgattagctatacacaacaaaattatgtaagtgaagtagaacaacaaaactcaaaaagtgttttatggggcgtcaaagcgaattcattcgccactgaatcaggtcaaaaatcagcctttgatagcgatttatttgtaggctacaaacctcatagtaaagatcctagagattatttcgttccagacagtgagttaccacctcttgtacaaagtggatttaacccttcatttatcgccacagtatctcatgaaaaaggttcaagcgatacaagcgaatttgaaattacttacggaagaaacatggatgtcactcatgccattaaaagatcaacgcattatggcaacagttatttagacggacatagagtccataatgcatttgtaaatagaaactatactgtgaaatacgaggtcaattggaagactcatgaaatcaaggtgaaaggacagaattgatatgaaaatgaataaattagtcaaatcatccgttgctacatctatggcattattattactttctggtactgctaatgctgaaggtaaaataacaccagtcagcgtaaaaaaagtcgatgacaaagttactttatacaaaacaacagccacagcagattctgataaatttaaaatttcacagattttaacatttaatttcatcaaagataaaagttatgataaagatactttagtacttaaagctactgggaatattaactcaggctttgtgaaacctaatcctaatgactatgacttttcaaaattatattggggagctaaatacaatgtatctataagctcacaatctaatgattcagtaaacgtcgttgattatgcaccaaaaaatcaaaatgaagagtttcaagttcaaaatactttaggctatacatttggtggtgacattagtatctctaatggtttatctggtggacttaatggaaatacagctttttctgaaacaattaattataaacaagaaagttacagaacaacattaagtcgcaacacaaattataaaaatgttggctggggagttgaagcacataaaattatgaataatggttggggaccttatggaagagatagcttccacccaacatatggtaatgaactcttcttagctggcagacaaagcagtgcatacgctggccaaaacttcatagcgcaacaccaaatgccattattatctagaagtaacttcaatccagaatttttaagcgtactatcacacagacaagatggcgctaaaaaatctaaaattacagtaacttatcaacgtgaaatggatttataccaaattcgttggaatggcttctactgggcaggcgcaaattataaaaactttaaaactagaacatttaaatcaacatatgaaattgattgggaaaatcacaaagtgaaattgttagatacaaaagaaactgaaaacaataaatagctagtaaaacacggtcgccaacagtaattgtgacgaccgtgttttgatttattatcttagtaatactgccattctttttctcaatgtgagatataaaggaatagctacaattaaagtgaatattacgcctggaatcgcgtttaacaacactacccacacaggtaaatttaaaataatagataatagtagcctagataccaaactgcctaatacacttgctaaaactaatgatagtacatttattttcaataaataaacaactgcaatagctataactctaaatataatagagataatcacattaattggattaaatacgccaaatactagtaataataggctagataataatccacctaaaaagtactttttaattccaaagaaagctaatatcaataatgctgccggtgcagataattgaaaatctaatcctggtataatggacggtattttcaaaactgccaaaatggttaaaatcgcagcaatgacactaatttgagtaatatcttttgatgtcatactaaaacccctataccgtttcataaacaacttgcttcggtgtgctttctaaaaatgatatgtaatgatttaaatcaatacaatcgtccacaaatattattctgcctccatatctcgtattaactggtttaatatcaaataatcgatggtaaccaattttagcagcggcaaaataacctgtcgtatacgttaagtcatcggacacgcaaagttctcctttgacatacggatgcgcattgatacaactagcaattgctaaggcatcagtcactctttcattaagatcacctttattatttatatcttcaaacgaaaaatgtgttgccctaatccccctttgtccaaatgaatctaaacgtttaccagatatagcagatagaataatagctcctgtataaaccgtttcatttttaatatatgtcatcccttgatttagcgcttgttcagtgacaccacattcttgtgttaaatgttggagatttgctttatcatcctcaataatttgtaatgcttttatttgttgaatcggttccatgattttttgtatttttatattgagaaaatccggttgcccattttcatgaaaaaaacctttattataaaacctttgtaccgtctgttctattttgtcaaactcacaaatcgtttcagcaccactaatatgaacatcttgattgctagaacgcatttttatactatacatgacgatcacctcaatcttcttgatgcaaaatttcaaacaacctatctatatcttgttcagtatgaaaatacgacaatgatattcttaacattggcttagtcacagttggataccttaaataacttgtaaacacatgatgctttaataatgtttgatgaatgttctcagccgcttctatgtcatcaaactcaataaacttaatcggcgagtttgaactattataattaacattgagtgcttttaacttttggttaaaatatttactcaaactatttaatttagtgcgtctatcatcagcatttattaacttttcaatgtttctttttataaaatacaaattataaattggcaaactacttgagtagatgagtggtctaccgtgattaattaacatatccttcacatcatttgaacttaaaatcacacccccgtatgcaccacatgctttagataaactagaagtgagtatatctacaccttgataattcgagtaattctctattccaaaactatgtgaaacatcgagtatcagtgttgcgttatatttatgctttaatgagactaattgaccaatatccacaacgtcgccattcgttgaaaatacactatcagatatgattatttttggtatattttgattagggtatttctctaaccttttttctaaatcagcaatatctaaatgcttatatatcactttttctaaaccacttaacttaataccgtcaataatactcgcatgattttcttgatctgaaaacacgacacaatttgtatttttgaaaatattaaataacgccaaattagcatcataaccactatttaagatagtacatgcactatatccgagccaacctgctaacattgtttcaatttcttcataagctgtcgaacttccactaattaatcttgaacttgataagtgataactatacttccgcataaatctttcgaaatcatccttatcaaacgctatttgacctaatcctaaataatcattagatgtatagttcgtacatctcttattttctacttcaatatactgtctatctatataccctaccgatttaagcgaccgatataaccctttctgttgtaataaatcaatttgctcttgaaacttcattcttgttttccttattttcacaagtgtcataatcaatttcaaagcctaaatcattaatcatatcgtagtctaattggttcggttgcccaccagtaattagataatcaccgacaaatattgaattcgccgcttttaatgctaatggctgtaacgaacgtaagttgacctctcttcctccagcaatacgaatttctttcgtaggattgattaatcggaataatgctacgattcttaaacatttcattggtgttaaatcatccatgcttccaaactttgtgcctttgattggatgcaaaaaattaatcggaatactgtcggcatccatttcttttaaagcaaatgccatatcaacaatatcttgattagattctcccataccacaaatcacgccagaacatggtgatatattattcgctttcattagttctatcgtatctgttctatctttataactatgcgttgtcacgacgttatcatggtaattttcacttgtattaatattgtggttatatctgtctacaccagctgacttaagtttcttagcttgttcgtcattcgttaatcctaaacatgcacagatttttagttgcgggtgttgagatttaatcgttcttacagtattactaatatgatcaacttctttatcgctcggtcctctaccactcataacaatacaatatgttccaatatgattatcatgtgccacctttgctccatcgataatttgttcctctggaattaaagcatatcgctgtttttgtttaatatctcgtgattgtccacagtacccacaattttcaggacatataccacttttagcatttaaaatcatgtttaattttacttttttaccaaaataatgttttcttaaaatgtacgcctcatttaataaatctaaggtatcaatattagtatcctcataaattttcaatacagtctcttttgttaattgttccccttgtaatatgcgtttagccaaattcatattaacacttcctatctaaaatgttatgtactgcctttttaaaaatacgtaccatcgttttcacttctttatttgacatacttaacactggcacaaacgtaatgacattttctaaatttctaatcattagcccgttttctttacaattacgtacaatacgttcaactttttcaatttctaacggcgttttactatctttatctgtaactaattcaactccaaacattaagcctcgtcctcttacatcaccaacatttcgatgacgcttcagcgcatgtaactgtttctcaagtgttgatgatgtcgtttcaatatgtgacaataacttacgtttttcataaagtcttatattttctaatgcaaccgtacaaacgatttgatttccggtgtatgtatgaccatggaaaaaggtattcacaccatgcgaatcacttaaaaatgcattgtatatttttttagatgtcaatgtagctgcaagtggtaagtagccaccagtaatcgccttacctaaacacataatatccggttgaacatcttcatgattgcatgcaaacatctttccagttctcccaaaaccaactgctacctcatcacaaattaataagacatcgtattttttgcacaatttctcgacttctttcaaaaagcctttaggatgaacaaacaagcctgtcgcaccttgaatcaacggttccaatataaaccctgcgatttcatcatttctttcaattagaatttgctctatattcgttaaaatagctgtcatcatttcattttcagtatcgtaattactgcgatagaaagatgggctttctacttgaatattctcaaatattaagtctttaaatattttatgaaaggtcttgataccaccaacacttaccgcaccaatcgtatccccatgataaccgtgatttagcgttataaacttgtttttcttggcatatttttctctatcaatatttttccaatactgatatgccatctttattgcgatttcaacagacgcactgcctgtatcagaataaaatacttttcttagattacttggcgtgatttcgattaatttttccgcaagttctattgacggaatatttgatgatcctagcagcgtagaatgggcaattttattgagttgctttttaattaccttatttaagtatttgttattatgaccatgcacattgacccacaacgatgcataaccatctaaatatttattgccattcgtatcgtaaaggtaactaccctttcctttttcaatgatgattgcttcttctttgctatatacacccatttgtgtaaatggatgccaaacatattctgagtctttttgtttaagttgttgtgtgtaattcatttttaactcctattaattgttttaaaaatgcttctgagaaattttcatacgtggcatgttcttcaaatgtatagactgttttatttgttaattttccaatcgtcatttgattgtctttttcaatatagctgtctgtatagcgattcattattaaaaaattactcgccgatacattctgattaacataatcttggtgaacaatggcatcgctaatagcacctaattttgatggcaacacactgatgacacaatctgcacaatcattgattagatctttagtcatgtagaaatcatctgtaccttcatatattggtacggcaattcccccagcaccctcaattaagataaaatcaaattccttatctaaaacttttaccttatctaatacacgctgcttatttagaaaaatttgatctgtcattttaaatgcaaggtgtggtgatacaggttgcttaaaagtataaagtgacgttatgtcatagcttaaatcacattcatttttaaatacttctaaatctggaaacgtcccgtcttggcgttcctcagtttgaaatggtttaaaaatacaaactcgatgaccacgtgttttcaaagcatggtataaatgctttgtaacataggttttgcctacatcagtattcgtacttgtaataaaaatcctcataaaaataaccacctcaatccaaatgtaaacttttataattaataagtttacatttaaggcgcatgtttttcaagaaaacatgaatttaaacttctcagtataactataaattttggcaaaattttgaccttgctattgaaatgactaagacttcttaaggaattcgggcagatataaacagcgattcgataaaatatgtcagttaaaattaataattgcattatttcttaataaaaagacatcctagctttaccatcttgtgaaacaatccattaattgtaatattacgttgagcgccttgttcatcaatgctataattagttacataataaattgaacatctaaatacaccaaatcccctcactattgccctagtgaggggatttattttgctgttgattatctatcaccctttttatttccaaattctgattccatattaaactattatttataatttccagcctgctgatttactttttattcttataaagtcttgatacattcctggttttcgaattaattcatcatgactacctttttgaattatttcaccttcattgagcactataatctgatctgcatttttaatagtttcaagtttatgtgcaattgtaattactgttttgcctttacttaattcattaattgccgtttgaatcagctgttcattttcagggtcaatacttgcagttgcttcatctaaaataattattggtgcatcttttaatatcgccctagcaatagaaatcctttgcttttctccgccagataaattactacctttttcatttagcattgtttgatatccctcaggtaatgacatgatgaagtcgtggcaacatgcttgcttcgctgcacgaataatttcttctttcgttgcacctggattgccaaacaatatgttattttcaatcgtatcattaaataaatacaccttttgaaatactgcactaattttcgacattaacgtacttaatgtcatatctttaatatcaacaccatcgatgcgaatatttccatcatcgatatcataaaagcgcaagagtaagtgacataatgtagatttcccacttcctgaaggtccaattattgctgttgatgtttgtgtaggtatctcaaaattcacattctttatcacttgtttatcatcatatgaaaagttcacgttttgaaaagcgatattttcatttttaatcgtcaaattttttccattctcatccagttctggagcattttttatcttttcaatatcatctatcgtcatatctatcatttcaagtacgtgtgcagcactattaatattttcaacactatcaaatatcacaaatgaaaaaattgaaatcataataagggtaggtaaatcaatactatgattcatatataataagcatgcaactaatacaatcattattgaaacaacttttaaactaagtaaatgcaataaattgaatgggatatattgcatttctatttttgtatttatacgtttactttcattgactgcttggttaaaacttttaagactcgtattttctttcgcgaatgattttattacttgaataccacgaataacctccaataccttttccactaattggttttgtacattatgatacgctggcgcattttgtcgactctttctttctaataattgaatcgcaaaaaatgatagtaatacgccaatgcatgctaataatgatacttgccacgaaactacaagtagagacaatatgagtactgtaattaatatgtatccattaacaacaacgtccaccattttcatagcaaagttttctaaaaaggttaaatctgttgttactattgttgttaactcatttgaatgatgcgaattaaaataacctaaccttacatttttcaatttatcccctatatctaaacgttctttcgcactcatttcataagcgatgctctcatggcttttgcttttgaaatatgctgtaataaatcgtccaatcactaataaaaccatgataattacaacattcaatatatctttcatataaataggtttatgagatagcacattattaaatatttttgcagctaaaaagataggtaacgcaataaaaatagcatttaaaaatgacatgctaaatcctaaaatcattcttgctttatatggtcttatccagtttaaaattttaaatgtaatttgaaacatatttgacctccttttctcattagtttaattatgtccagtattgattccccaatcttttgtatgcatgtgcgtatcccacattttcttataattaccgtttaattttagcaataagtgatgtgaccctttttctaaaatttgttgtttacctaaaacaataatttgatctgcatgttgaatcgtagataaccgatgtgcaataacaatcaatgttttatcctgcgtcaacacatttaatgcttcttgaattttttgttcgttgtctggatcaacgtaaacagtcgcttcatctaatacaatgataggcgcatcttttaatatcattcttgcaatagtgactcgttgtttttcaccaccagacaatttatctcccactgtaccaacattcgtatcatatccatctggcaacttttcaataaattcatgacattgtgctaacttggcagctttttcaactgcctcatccgtagcttctggattgccaagtttaatattttctttaaaagtaagatttaataaaaagttatcttgtccaacaaaaccaactaaatcgttaagttgtttcgattcaatatcttttatatttataccgccaatcgtaatttcacctgaagtcacatcccagtatcgtgatataagcttggcaatggttgacttaccgctaccagatgccccgacgatagctgtgaaattattttctggtactgtaaatgataaatgcttaaagaccagatcgtccttatctttgttatatgaaaatccaacattattaaaagcaatttcataatgttgaggcttcttaaattttgttgacaatactaactcttctagacttaatatttgattcacttcagttaatgcgtattgtatagactttaaatgatttacataattagtaaaattcttaatcggtgctactacacctaaagataatacgatgcataggaaaaattccgcatagtttaattggttgatagatatcaaatacatgccgaccggtaaaatccctaaaaatgttgaaggtaatacactagctcctaaattcatatacccccatgtatttttaaaccaattcaaagtgtgaatcttataattatctactgcatctttatattttttatatgaactttgagattgattaaatgttttaatcacttcaatgccttcgataaactctacaatcgcgctattcatataattattcgatttcatttgttcagcatatgtctcattaaatccagacataacttttttaaaagcgaaaattgaaattggtatcgttactaataaggcactagccatacgccaatcaatgagcattatgtataaaaagatagcagctgacaaaagtaagtttcctataacttcaggaatcatatgtgctaaaggtaattctattgtttcaaccttatcgacaaatatattttttaattcacctattttcttagattccactacgcctaaagggagacgcattaatttttgagctaattttttacgaatttcagataaaatttcatatgccgtaatatgtgatagcatcgttgacgctccaaaacaacacacttgtgaaatataagcgattaaagcaataaagatataaaccataatcgaattaatcgtatatgtattgttaatcatcattaaaataattttaaatactgcccaataaggaactaatccagaaaagacactgatgatagacaacaaaattgataacataattttccatttactatcagaagcaaatccgctgagtatctttatccaatttgtctgattgttcatcgtatatgtaactcctttcaattaataatctaaattaagccgcttatattatttatttcactggatgatatacataatataaatttgttatttgttaaaaattaatacttattacaagtacatcatatattagttgataacgattatcaatgtcgcgtggatttgtgacacatttcttttaaaaattcacaaggttatggggcagaaatgataaagagccactaatgatttattatgtagtggttctgggagtgggacagaaatgatattttcacaaaatttatttcgtcgtcccaccccaacttgcattgtctctagaaattgggaatccaatttctctttgttgggtccctgaatatagccttgtagagtctagtacattgatttgtatcccaatgtccctataattgattattcgctttatctaatgatcctatgactcaactattaaatcatttttcgaaatacttaattctaatataattaaattcatttattgtaatattgcaaaaatacattgcacaccttgttcatcaatgctataattaattacataataaattgaacatctaaatacaccaaatcccctcactactgccatagtgaggggatttatttaggtgttggttatttgtcaccttttttattgttgcgcgttcgtaaccaatgtgcaaaaaacgcaacaagacagccgcttatagctgaagtcatgatgttaattaataaattgaacatccgtcatacacctcctctctgcgttaaagtaacgcccgagatgttaggcgaccatcatattatatcatttatttattatatttcacgcaatattaaggcttaagtaaagttttttttagtggtttacgctactttaattgctatcttttaaaatccatttagataatataaatgtgatgggtatcgtaataattaaaccagcaaatggtgcaatttctgctggcaaatttagccaggatacaaatacatataataaaactgtttgtaagcttacgttgacaatctgcgtaattggaaaactaatgaattttctccaagtaggttttaccctgtaaacaaaataacaattcaaataatatgaaatcacaaaagcgactagaaatccggtaatatgactaatcatatattcaatgtgtaataattttaacagcaataaatagacaacataataatttaacgtattaatgccgccaacaatgataaattttaaaatttcagcatgcgtttgtgttagtttcatatgtgtaactcctcaacatcaaaatatatgcataactacgttctcgaacatactcgaatatgcgagccaatccgcttcacttcaaatatgcttatttcaatctttataccctttcacagcaaatttagtctctttcccctcatccttatacgccattataatgtaactgatttatcgcgtgactcattagcactatagagattactttagttcactagtaattttatatacaataagagcgacaacagtaatgagaggatgtctactatgcaattacaaaaaattgtcatcgctcctgactcatttaaggaaagtatgaccgcacagcaagttggcaatattataaaacaggcttttactaatgtttatgggaatacccttcattatgatatcattccgatggctgatggtggtgaaggtaccacagatgctttaatgcatgcaacaggtgccactaagtatacagtcatcgttaatgaccctttaatgcgacctattgaagcatgttatgcacgcgcagacgaacaacaaattgcaattattgaaatggcggcagcgtcaggtttggatttattagaaaaagaggaacgtaatcctttatacacatcatcatatggtaccggtgaactaattaaagatgcattaaatcatggtgctaagaccattattttagggattggtggcagtgcaacaaatgatggtggtacaggtatgctaagtgcactaggcgtaaagtttactgatgtaaacggggacttattacaaatgaatggtgctaatcttgctcacattgcacaaatcgatataaccaatctagattcgcgattaaaagaggtgacctttaaagtggcctgtgatgtttcaaatcctttattgggtgaaaatggtgctacctatatttatggtcctcaaaaaggcgctgatgcaaagatgataccaaagttggatttcgcaatgtcgcattatcatgataagataaaaatgtgcacaggaaagtccgttaatcaaataccaggttctggtgcagctggcggtatgggcgcagcattattagcgttttgtgagacaactttaacaaaaggtattgatgtcgtctttgacattacagattttcatcaaagaattaaagatgcagacctcgttattactggagaaggacgcatggattatcagaccatctttggtaaaacacccgtaggcgttgcgttagctgcaaaacaatatcatattcctgtcatcgcgatttgtggcagtctaggcgaaaattatcaacatgtttacgatttcggtattgatagtgcctattctataatctcttcacctagcactttagaagatgtcctacaaaatagcgaacaaaatttattaaacactgcaactgacattgctcgtattctgaaattacaataatgtcaaagtaaatcatcagctttattatttgcagttaaaacttgaatgaggtgaaacccatgaaaagaactgataaataccgtgattcatatcaatacgacaatcaaaaccaaaatcatcgtcgtcaatctgaagacgcatcgtatagacaacaatatgctaaaggcgatcctgaagaacacccggaacgatactataatggtagagattatcgaagagaacaaattcttgaagaagaaaacgagaaatcccgccgttcaaaaaaatggttatatatcattattgccattctcttaattattgtcgctatttttgtcacacgcgccttacttaacaatgatagcgataaagttagtaatgaccctaaagtctctcaaaattataaaaaacaagttgaaaatcaagacggccaaattaaccagcaagtagataatgctaaagaaaatattaaaaacaaccaaaaaactgatgacattattaaaaatttacaaaatcaaatcgacaacttgaagcagcaagaacaaaacaaagctgattctaagctaactcaattttatcaagaccaaatcaacaaattgacagaggcaaataatgcacttaaaaacaatgcaagccaaggtaaaattgaaagcatgttaaatgatattaatacaaaattcgacagtattaaatctaaattagaaagcttatttaaagatgacaatggtggcgctaattaattattacacctgctttgatgataaacattaattccctatactttatctgtatcactacgttattcgtgatgatgcattaagagtatagggattttttatataaacttgtattctaactacatacaaatacacacaaaacgtatataatttatataattatatcatttaaaggagtctgatcatgcaatcaacgaaaaccaaaacgaagcatttttcatttttattgctaattacgttaggcgtcatgaccgcttttggcccactaactatagatatgtacgtaccatcattacctaaagtgcaaggtgattttggttctactacatcagaaattcaattaacattatcattcacaatgattggtcttgcactaggccaatttatctttggacctttatccgatgcttttggtcgcaaacggattgctgtatccattttgatcattttcattttggtatcaggtttgtctatgtttgttgatcaattgccattattcttaactttacgatttattcaaggtttaactggtggtggcgtcatcgtgattgcaaaagcctctgctggtgataaatttagtggcaacgcactcgctaaatttttagcatctttaatggtagttaatggcatcatcactattcttgcaccattagccggtggattagctttatccgtagcaacatggcgttctattttcacaattttaactattgtggcactcatcattttaattggcgtcgcttctcaattacctaaaacatctaaagatgaattaaagcaggtgaattttagtagcgtcattaaagattttggaagtcttttgaaaaaaccagcatttattattccaatgctattacaaggtttaacttatgtaatgctatttagttattcatctgcatcgccatttattactcaaaaattgtataatatgacaccccaacaatttagtatcatgtttgctgttaacggtgtaggtttaatcattgtcagtcaagtcgttgctttattagtagaaaaattacatcgccacatattattaatcattttaactattatacaagtggtaggtgttgctttaattatcctgacacttacattccatttaccactttgggtcttactcatcgcattcttcttaaatgtgtgtcctgtgacgtcaattggaccgcttggtttcacaatggctatggaagaacgaacaggtggcagtggtaacgcatcaagtttacttggcttattccaatttatcttaggtggcgctgttgcaccattagttggcttaaaaggcgaatttaatacatcaccatatatgattattatcttcattacagccattctattagtcagtctacaaatcatttactttaaaatgattaaaaagcaacatgtcgcataacacttcaacataattagaaccctagcaaagatatctatctttgtcagggttcttctttatgaattatgagatcgaatcttcaactaaaattacgccttcatagcaaggacatttctattcaatcaccctttaacaggcatccaaatttctgtaatatatttttcacttgtagtatcaccatcctgatacaactcaaaaaatggtgctgattttaccgtatctgcttgatattgatgtatgtagtgatgaacctcttccattttttgttgaactgctttaggtactgcgccctgtgcttcaaataccatatactttgaacttgctaatgttatgacatcatatttttcaatatcagcactattatctccggtaactgcaatcatatatgacatcttaccgtctaattcaggtatacataagccaagtatcccggctaaatcaccattattttttaactgtaaatccgcaattactccctcttgataacatctttgccaaaaccctgctatatgttgctgagcctgtcgtccattttcatacgtttctttaatacctactaacgttaacgacgcaagttgttgtaattgatattccattttatcactccattaattttattcactcatgtaaaacatatgtttaggacattttgcattgacgctatataattatattaaatatttattgaatcaatgcgaggactatattatgaaccgaaaaatattaccagttaaacctatcagtcagctatttcctatccctatggtcatggggtgtgaaggtgtttccgcagccatgatgttgcaatacaacaaccaacatatccctgctacagaaattatgagacattggccgacacatccgaacaatccacataaaggttatgttggacatcacttattcattaagcttggcaattatcatcaaacgatatttccagaagcatatgtaccatttttacaaaaatacaatcctaatatcgtagacggcactggtaaatcgttagaagatcttaaaggtattatcgatcaaggtcaacctgtgttaatataccatactaatcttggttctaaaccattactacgtgttttccgctttgataacaagccagcgaaacaagtttcaaatattcacgtaacgttactcattgggtacgatgattactattactattatatcgatccactttggagtcatattcgtcgtggcctagttttacctgccatcattccaaatcgcaaacaaattattaaaattcgtaaagagaaaatggaatacagctttaattcaccaggaagaaagtgcatttatgtgcaaccacattcatatacaattgaaaatcagcaacaaaataaacacacgtaagtaaacacattactcgcgtgtgtaaaacataaaatgcgcaaactgggtcaggtttgcgcattttaaatttctattatttgtatcgtctcatttatttcctggtaaatatcttctgaacgccattgtcttggatagcctagacacggacagagataacatctgccatcatctatcacacttttacgaaaatgaacatggcccataatactatatggtatatcgaacatcgcatacaaaggattgaaatcacttgtcccaataaatgcattataaaaatcgaatatacgatgcggcataggaacaatgaaatcagggtgcgtcacaacatgtgtgactaaaatcactcgtctatttcctacttctaatatatctttcttcacttgttcagccgctattttagataaattttgatctgatatgccccaagatattcgttctttatcttgccaagtcgcaccataatgttttcctttttgtaactcatctaatgaaaatcgttgtgctgcaaagctataatcataccagccagtatgtcctatgattgcccattcttcatttactataaatggttttcctaccaagcactgtgacatactcttataattattccaaatgtcttgcgtagtcatactttcaacttcccataaatcatggtttccaggtacaaatttcacaggtatatctaattgttttgtcaattgcgttataaattggtgcgtcaattgataatgatttgagatatcccccgcaatcaacaatatatccaatttcttatacttaactatttcaaccaatgcctctaagtaatcttcggatgtttttttattatgacgatcaatatgtaaatcggcgattgtccctatcttcatacccttaccttctttactcaaattaaaatgttatttattatgccatagcttatctaatatatatagttaactgcttcatttagatgattattttatatttttgcataaaaacttatatcttttcaaaaaaatcgataagttttagttatcatacccttacctatcaaatgttttttcttatatttaaaaaaataattgctttattaaatggatttctttagtatttataattaagaaaacgcttacacacaacttttttatttgctttatcctgaggaggaaaattatggcaagaaaattgcatagagagttgaataacagacacatccaattaatagcaattgggggcgcaattggaactgggttattcctaggatcaggtcaaacaatatctttaactggtccatcactgttattcacatacatgattattggggttgtactattcgcttttatgcgcgcattaggcgaattgttgttgagcaatacaagatttaattcatttgttgatattgcaaatgaatatttaggcccttttggtggctttgtcattggctggacttactggttatgttggattgtatcaagtatgtcagacctaactgcgatgggacaatactttgcattttggtatccacaagtcccaaattggattaccgtgctatttattgttttaatcttgattagcttcaacttattaggtgccagattatttggtgaactggagttttggttctcgattattaaagttgtcacaattattgcgatggttatcgttggtcttgtattaatctttttctcatttaaaacacattatggacatgcatcattcacaaacttaatcagtcacggtggcatgttccctggtggaacatttggtttcttaatgtcattccaaattgctgtatattcattcattggtattgaacttataggtgtaactgctggtgaaacgaaagatcctgaaaaaaccttaccgaaagcaattaataatgtacctatccgtattttattattctatatcggtggtctattagtaattatgtcagtcataccttggaatgatatcgatccaaatagtagccctttcgttaaactctttacattaatcggcgtaccatttgcagcaggtgtcgttaactttgtcgtgctaactgccgcggcctctgctacaaatagtggtatctattcgaatagtcgtatcttattcggactgtcacaacaagggttaggtcctaaagttttaaataaaacgaatagtcatggcgtgccttatttatcaatgttagtttcatcaattgcattacttatagcagccttgttaaactacattttccctaatgcaattcaactattcatatacgttacaacgttatcaactgtgttgtttttagttgtttgggcaatgattattgtcgcttatctaatgtatttgaaaaagcatcctgaggcacataaaaacagtaaatttaagttgattggtggtaagcctattgcttacattattctagcgttcttcttctttgtattcattttattattctttagtgacgaaacaagagcagctatttatatttcgccattctggtttatatttttatttttcttttataaaaaatacaaaacgaatgctgaaaagctcgcgtatgaacaacgacaaaatgacagcggtcatttcagatatgacaatcaataatttaaacatctcgctctagtatcagttcaaccgatactagagtttttttgaaaataacttcattttatcaatatatctatgtcattatgccttaaaagtgataaaatattaactattaaaattttgaggagtattgtatggcactattagaagcatttttaatttttatttttgctgtgattattagttcggttatcaataatcgattcccacaaattcctactgcctttattcaaattgcattaggtgtcgttattttcattattccaatacaagttgatttccaattcaattctgaagtatttatgtttgccgttatcgcgccactactttttgtggaaggtacccacgtctctcgaacaaaattattagaatatcgtaaacctatactattaatgtcaatggcactagtgtttgcaactgtagtcggtgttggctattttatacattggatttggcctgccttaccaatgccagccgcttttgcaatagcagcaattttatgtcctactgatgcagtagcagtatctgctattacacgcggaaaattattacctaaaggttctatgacgattttagaaggtgaatctttactcaatgatgcagcaggtatcatttcatttaaaattgctgttactgcattagtaactggtaccttttcattattccaagctgttgaacaatttatcatttcaacaatactaggtgtacttattggtgcaattattggattcgttgtcgttagaatacgtatagacttaaccgctaataaaggtttaaaagataacaataccttaacttttattcaattattaactccttttgtcgtatactttttagcagaagaagttcatgcttcaggtatcattgcagttgtaatcgcaggtctaatccatggtttagaacgcgaccgtttaattagagcacaaacggaactacaaatgaattaccatcaaatttggaacacatttagttatgccttaaatggttttgtatttgttgtattaggttttatgattcctactgtagtcatagatattttccaaacagagcctgacaacttttcatttttaatagtgatcactatattaatcgctattgcaatttatgcatgtcgatttgtttgggtttatttctggtacaaagatttttatttcccgaaaaatatacaatcttatctagacgaggaacatgattcacatgaaacaccaccttctcgagtgcgttacgcatttattatgaccatgtgtggtattcacggtacaatttcactttcaatggcacttacattaccatttatcattacaaaaggacaagcattcgaataccgtaatgatttattgtttattgcatctttcatggtattaattagtttaatcttagcgcaaattgttttacctttaattacaccatctgccgaagatactacttttaaaggtatgacttatcaatctgccaaaattttcattgttcaaaaagtgatccagcattttaaaaacgaaagtaaaaaagacaaaaacgatacaaattatcgcccagtattaaaccaatactatggagaattgttatttttattaaattcagaacctgataatcaaaatacaaaagaactcaaacgtttagaagatattgcaaaagtaatcgaaacatctacacttgagcgtttaattgataaaggtaaggcaacatatcaggatattaataattaccgcaatattgtcgaattaacagagacacaccgtactgcatcatttgttgaaaaatttgcaaacttcttcaagatgttatggcttagacttaaagcgatgaagcactacaaagccttaaataaagaatctaagaagcaagaatttgaaaattcattcaaagatgttcaaaaaattatgcgtattgtgaatcacaatattattttacgcttaaaagaagaacaaaatagtacaaatgtacttgaggttagcttagtcattaatcattactatgatatgagtcgctcattaaagtggcgtgcacaacgtcgaaaagaacgtcaagaaaacagcaatcaaatcataccgcaagctatgttccataaccacaaattggaagcattgtacttacaacgtcatcttttagatgaattaattcgcaaaaataaaatcaacaatatcgttgcagctcaaattcgagaaaatatcaattacaacgaaattgtcttgtctttacagtccaaacattaagcaagacataacaatacccccgtacatatgagacaaagtcattatcatctcatatgtacggggtttttatattcaacatcaaaaaatcagattgatgaaaagtaaataacctttcatcaatccgatttgattatagaatctattttttaagtttaaatggaattgtacatacgttaacattcttttgataaattaaatacaatttcatacgcaaactagtttgattgtgtaataaattatgccaacgtttcttagtaataaattctggtatcactactgtaatcatatagttttgatcgttggctttacgattaatcttatcgataaaacgtgaaattggtcgtataatactgcgatattccgaatgtaaaataactaatcttacatctgggaaatgacgtttccatttctcttggaatgctttttcatcttcatctccaaatgatacatgtactgctatgacatcattattcgcaagcatttgtgcgtaataaatagacttatcaactgctgttgtaatacttgttatcggcacaattgctaaattacgatctaccacgtccacattaagaacatcaatgtcagaacgtaattgttctgcgatatctcgataatgtttgttaattttcaagaagaaaatcaccacgaacggcaagaaaataagtatcggccatacttggctaaatttagttatgagtaaaatcataaaaacaataaatgtcacgataccaccaagtaagttcacagacaacttacttaaccaattcttaggacgttcatgaatccatttaataaccataccgaattgtgctagtgtaaatggaataaatacaccaaccgcatacaatggaattaaatcttcagtcataccatcaaatacaataattaaaataatggctaatacacctaaaataataatcgagttagagtagcctaagcgatcacctctaacagtaaacattctaggcatatatttatctttagacattgaagccgctaacatcggaaaagctgtaaatccagtgttggctgctaataccaaaatcatcacggtcgttgcctgtacaaaatagaaggcagcattatcaccaaatatttgcatagctaattgtgataaaactgtcgtttccgtttgtggcaaaattccataaacatatgctaaaccaacgataccaactaataaaaacgctaaaattgaacccatagcaattaacgttttcacagcatttttagcacttggctctctaaaattggttaccgcatttgaaatagcttcaacacccgttaacgatgaagcccctgatgaaaatgcttttaatagcaagaataatgttactccaggaaccgcagttcctactgatgcatgcatatgtggttgaatatctcctgtcgccacacggaaagtacctataaatattaatatcactaaccctataatgaaaagatatactggataggataatacggtggcagattcagttaaaccacgtaaatttaatattaaaataaaaagtacaagtaaacatgcaatcagtactttatgcccatataaacttgggaatgcagcaacaaatgcatcagcaccagatgatatactaacagcgacagtcagtatgtaatcgactaataatgagcctcctgcaagcaatccccatttttctcctaaattggtcttggacaccatatacgcgccgccacctttaggatatgcataaataatttgcctataagacataattaaagcagctaataagatcagaacagcacctgcaatcggtaaagtataccaagttgcaactgcacccactactgatagtgtaatcagtatttgttcgggaccgtaagccactgaagataatgcatccgacgaaagaatcgctaaccctttaaacttcgatatcttttcgtcttttagttctctgtttttttaggttgccctataataagtcttttaaattgattgaacataatctcctattcctttttatagtttttgatggatatcactatacgcctatctttccaaaaagtatagagagttaattaatattttttatgtaattatacacctattaacatataaggtgtcaaaaataatggtaaatatacctctttaattaatttattcaatagaactggtataataaaataaatctcattaggcacttaagtaaatttaacatataaaaaggaacgtttatgactactaaaaaactgtattttctatccatttctattatcattttagtcgccatttcaattgctatatatataacattaaatagcaatacgaagacacggttaaccaatgattcgcaacaacaaatagatacaattatcgagcatgatttacaaaagggacacattcctggagcatcaattttaatagtaaaaaatggcaaagtttttttaaataaaggttatggttatcaagatgttgataaaaaagtcaaagcttctcccacaacaaagtatgaaattgcttctaatacgaaagctttcacaggtcttgcaattttaaaattagctcaagaaggtcgattaaacttaaatgatgccgtatccaaacatgtgcctcattttaaaatgaactataatggtcaaaatgaaactattacgattaagcaacttttggctcaaacaagtggtatacctagtgatattacaagcgaagattctgtgacaagcaaaaataatcgtttaaatgatgtaacccatgcaattatgggtgatgaattacatcataagcccggagaagaatttgaatactcaaatatgaactatgatttattaggtttaattatccaaaacgttacgaagcaatcctatacaaaatatattacaaattcatggctcaagcctttgcatatgacacatacatcattcaaacaaaccaattacaaatcaaaacatgatgctattggctatgaattacaaggttcgacacctgtcgtctctaaacctgaatttaacctttgggatacaccatcagcatatatgatgacatcaactgaagatttggaacattggataaaattccaacttaatccacctgataaatacaaatcattagttcaacaatcacataaaaatttatcttcaacaattggtgaacctaatgccaatgcatatgcttccggctggtttaccaataatgatgaacatttagtgtttcattcaggaacgctagataacttttcatcatttattttactaaatccaaaacaaaattatggaattgttgtacttgcaaatctaaattcggaatatgtacccaaattagttgagcatcttaatacacaaattgtaaatcacaagcgatattcgacggttgcgtctatgctcaatcaatataaagatcaatttaatattgttaccgttttgatgacaacacttattttattagcatttatattctcagcttatcgtgcttggcaaatgcgccatggtcaaattcttttgcgtagatcaaaacggattgctgtattgagttggttatcattatgtatatgtatcgctttagcgctcatattatatgcattaccatatctcattctcggtagcaataattggtcttttgtactgacttggctaccaatagaaattaaattagcactaatcacaacattaattgcattattcagtacattaattgtaattctgttattccttcatacaaagataacgaagacataataaaaaagacttgttcgagccgtgcgtttgataatatatcatccacgattcgaccaagtctttattctttgtatattaaacggataaattattatttaattggattcatgccatctttccaagtttgataaatcagagtaccaccttgcgctttaaacttctcattgcttacgccacgttcaaatggttgcgcaggttgaatatcaatatttggttcaacaccaagttgttctttataccattctgcaaattcagaacctttaacaggtgcatcatctgctacattatagataccattttcaaaatgaatagcttgaatagatgtttcaactgcatcatcaagatgcacaaatgatgttacgccatctgaaagtgtcacttgaccatccataaattgattataaatcatgccatcttttccgtaccaagtacctgggccatataaccagccaaaacgtaaaacaacgtattcatccatacgagccgtttcttcttctaaaccaaccacaccatcaaccgttacttttctatcgccagttgagttaaaatcaagtgaagtttcctcatttgctaatccttcgccaggttcatacataaaggcaatactttgggcaattactttcttaacgtcatgctttttcgccgcatcaattaggtttttagaaccttcaatacgtactttcgtatttgctgccatatcaacattttttaaatccgtaatttgattgataatgatttctggtttaaaatctgctaacgcttgatcaatagtatcagcttttaatatatcaccaatatatgcttttacattaacagcagctagcttttgttgaccattctcagatgtagtaaaaccagcaacctcatgcccctcttcttttagtctttgaactaatttaatgccaataaggcccgttgcaccagttacaaaaattttactcattataaacaccttttctctatttgtctttttaatataattacttgcttgatgagtttacaaaattcacgtgagacttccaaatgatttgcctcaaaatttttcaaagtgtcgtcgtaaaaactgtctagtaaatactaatagtatgtcgtagacctatgacaaatctgaattatgacgaagatcaatcaagaaaaacagcaccaagatcatttcaatttgaaagtaccttactgctgttctttatttattacatttcaatcttaataatgaccgtaatatcacgtgattgtcatttccttgtaatcatacctaaaacaccaattaatcctgtgcgtgtcgctgactttctttagtatgaattaaatcagtaataaagcgattgactggcgcttcaatatgacgttgtttacctaatgttgcaactgcgccattaatataatcaatttcagtttttctattattaacaattaaatcttgatacatggatggataatgcgcaccaactttttcatttaaatcaactaaatattcaaatacttcatcaacatttaaatgaacattatcaatcgtcgctacatgcactatttcttgcgttaatttataaatcaaacacttcgcataactactttcattcagcgatgccatattacactccaacactgtgcttaatgcatttgccgtaccattaacacaaatctttttccaaatcgattggtataaatctttactaatgacaccattcaattccgcttcgttaagtaaatcagcaacttttataacattttctttaccttcatccactagttcacctatttcaactggtccactaccaagtaaatgactgtgtccagggctttcaagacctgccgtccaagtcgtaacacctctgacaatttgtgattgagcaacatactgcgcaatgacttcttcatgcttcagaccattcatcgtacatacgacgatcgtttcattatcaatatgtggcttcatatcttccatcacttcttttaattgcatagactttggaaatagaaagacaacatcgtaaatgctttcgtccggttgatcattaaaatgatacatcggaatgtttaactcgaatgcctctccattaatcgttatatttaatccatgttgcttaaccgcttcaacatgagatgtatatccgtcaataagtgtgacatcatatcctgcttgaaatagtttggcaccaaagccactacctaatgcacccgatccagcaattgcaattttcatcctataaacccctcttcatcgttgttgttcattttaaaaatactactttcgcatattagcgtcaatttgaaaatcattcgcttaatatgcacacagcttttatcgtctataaaagaacacacctaacattaaacgtcaatacgcaacattaagtgtgtatgataaacttactttcacaaaatttcctttaaaatccctacataataacttgctttcatttcagttttacaaattcgtttgatttttaggaactaatagtaaaatgactaaaaatgcaacaattgctagcaaggcattaaacatcatacctgtgaaaccacctaagttcaaatttaaattagctgctaacacagtataaaccgtaccagatactgctactccaaatgcatttcctaatgatgacgccattttatacacacctgaagcaacacccgacttatcatctggcgcactagcaactgctgtatcagttgatggtgtagcatataatcctaaaccagtaccaaacaataaatatccaactatactagatatgatataccacacttctggtaaaaatgttaacgacaataagattaacccaatcactgtaaagccacttcctagtaatagtgggcgcttcggaccatgttgagataaaatcttttcacctacacgaatcattgacaacactgttattaaatacgttaatgaaatataacccgtttgcgaagaattaaatcctaattgttgttgataatacgtgttaataacgataagtgcaccacctgctacaccatttaataagaagtttgaaatagttgcaccactgtatcctctatttttaaaaattgaaaaatcaacaagtggatgctttattttattttcgtaatatacaaaaccaactaatgaacagataaacacaacaattaaacctagaattaacggtgaaactaaaccaaaatgagacgtctgtgtgatgattacatttaaacttaacatcgtcactactaaaatgactaaaccaataacgtcaaactttttagcttctgctttcatacctttgattggttctgctttagtctcaggtgcatgtttgattaagtacattgctaataatgttaatagaattgaaacaacaaatattgaacgccaacctatatatgtagccattaagccaccaaacaacgtacaaataccactaccaccccaagaaccaatagaccaatagcttaaggcacgttgtcttcttgtaccaatataatattcgttaataatagcaagtgttgatggcataatacatgctgcagacaaaccttgaattattctacctataattaaaaatgctggcaaaggtgtaatgatgatgagtaatgaacctacaacatttaatatcaatcctacataagtaattttgacgcgaccaaatttatcagcaacatcaccagcacctacgataaacaaaccagcaaataaggcagataagctaacagcgatatttatcgttccaacgtcactactatatgttgattgtaatgggacaacaagattaacaagtgactgcgcgaatagccaaaaggtaataacccctaaaacgatacccaaaagcaatcggttgtcacctctaaattgttttgatgtgtccatgaattagataagcctcctatgtttaagaaaaacaaatttttaatatgatatattaagaaacaatatcataaatttgcagaaaattataaataaaacatctcattttttagtatttttacaataattaacgctttttatccaaaaactttcatgataataattgctattttagtgtaaacgcatacaaacacaacctataaaaaggctactcaaagattatttgagctccttgagtagcctcattttttataaatcatgaaacgaaatcgctaaattataaacatcttctactattacatattaatactttgcggccgatgattagattgatttttacgatgtcgtgttgttgggtctaatcgtttttctaaaaatcttaatagtacatcaatgacgattgcaatgatagcaatcggaatcgcacctgctaaaataaacgttgtgccatccgtcgcatttgtaccacgaatcacaatgtcaccaagcgtaggtgctcctataaatgatccaacggcaacaacacctatcgcaacaaccaaggcaatacgaatgccaccgataataaccgaaacagataacggtaattcaatcattcgtagcacttgattgcgtgtcattcccatacctttgccagcatccttaatattcgcatcaacactagctataccagtataagtgttttttataattggaagtaacgcatataaaaacactgttaaaactactgtttctgaacctaagcccatgactaacattaaaatagctaacattgcaatgactggaactgtttgaattatatttgcaattgtaattacaaatccagaaagttttgtgtatcttgcaagcaagattcccaatggaataccaattaaagctgcaaacagcacaccatagacagacattaataagtgtttgaaaaataaatcccatagataaccaaagttcgtaacataataattgaataattgctgtaataaattaccttccattacttatgaccacctttctgtttatcaaaatagtggtgttttttcaaaaattcttctgcgacgacagcaggttctttacctttaccatccgcttcataattcaagcgttgcatctctgaagtcgaaatctttcctgtcaacttattaatcgtcgttttaagttctgggtgttgccgtaataattcatttgttgcaacagcactcgcagcataaggtgggaaaaattgtttatcatctttaagtactttcaaatcatacgccgcaattcgaccatctgtagaataacctaatgcaacgtctaacttctctgagtttaatgcgtcgtagactagacctatttgcattggtctcactgtaccaaagtcaaaaccatactcttttttaaatccttcatagccatcgcctttacgattcatccatgaactatccatacctaaacgtaaatctttactatgctttgctaaatctgaaactgtctctaaatgatattttttagcggtttccttcgttaccatgaatgcatacgtattcgcaaaaccatacgaatcaaaaaacgtttgatcaaatttctttttaaatccttgttgtgttgctatcattgctttcttaggatttttaattggtgcttccttcaaagctcccgttaaatctgtgccattatatctaacacctgatatattagcatccccattaattaaggcattatgttgaatcgtacttgaccctaaattatttactaatgttggctttatcttaccgtgtgtatcatgctctattaacaaccgtaacatatgtgaaataatttgcgattcgcttgttgataatgctgtaattttgacatcatttttcgtgctcttactacctagtccgggcaaactacatccagataatacggtaagcgataagacaaacacgacaagtatatatttaattttcttcattatcttagcctcctaattatccagatacttttaagcctttgggaactacccatttttcaactaaagctaataaggcatcaacacctaatgctagtgcagtaacgagtaccgttgcagttacaatcatcagtggatcatataaatttaaaccattgaaaatgaaatcacctaatccacccgcacctacataacttgcaagtgtagcccaactaattacatacacagatgacaaacgaatgccaccaatgataagcggcaatgctaacggcaattcaacatccttcatcaattgaaattgtgtcattcccatactttttccagcttctttaatgttgctatcaatattttgaacaccgagtaccgtgttatttaaaataggtaataatacataaataaatagcgctacaattgcaggcgttttaccaacaccaaaaatcggtatcataatagcaagtacagctagtgttggaatagtttgtaagacacctgccacagttaatacaatattggcagttcgctttgtttttgataataaaatgcctataggtactgcaacaatgatggcaagtaataatgccactatagaaatatagaaatgttccagtgttttcgacatcaactgtccaccatgttcatgtaggaactcaatcatgatttatcatctcctatgtcacgtactttgacattagtagtgtgttgctcatgcacttttgaggacgcagtgtcttcccccacatgttctgtttgcactgtatcctcactatcgccccaaatcgtgtcatatacaatatcaacaacattggcacgcgtaatcagtcctactaaacgctgttgatcatctacgacaggtacattcctaacgtttctttttaaaatcgtacgtacagaatcttgtaatttagaatcaatttgaacggtataaatatgttgttgcatggtgtctcgtaaacttttgtgtccacgtataccctgatttatatcttcaatgtctaagaaacctagtaaatggttattactatctactacaaaaatagtatcaacacgtttttgtctcataatatgaacggcgtcattcagtgttgcttctgcttgtatcgtgattggtttaatcattacaccttctacagtcttgtcattgggacggtcttgaatcagtctattttgtcctataaaatcacgtacaaaatcatttgcgggatgtcttaaaatattgtctggcgtatcaaattgcaccaccttaccttctgacataatacaaattttgtctgctaatttaatcgcttcatccatatcatgtgttacaaagataaacgtcttgcctaattttcgttgtaacgttttaactaaatcttgtaacgtatctctcgtaataggatccaatgcaccaaaaggttcatccattaaaataatatcttgttcggccgcaagtgctcttacaacaccgatacgttgttgttgcccacctgatagttctgctggataacgctctaaaaatgactccggtaaatccacaagtttaattaattcctttgcacgtttatccttttcctctttagtccatttcaacaatttgggtaccaacacaatattctctttaatcgtcatatgaggcattaagccaatttgttgaataacatagccaatatttctacgcaattcgacaggattcatactccgaacatctttaccatcaatttcaatttgtccttctgtcgcttcaatcatacggtttatcattcttaaagcagtcgttttgccacttccactggttccaataaatgcgataaattccccagattgaatatctaaagagatgtcatctactgcctttttattaccagaataaattttcgttaaatgcttaatacttaacataatcatttctccttcctcataaaaaatatgacgaatgatacgcataaaataaaaagaccattatcgcaattgttaaacaaatagagtcataagttaaacaagtacacatcatggtcttgattatgtagaattttatatttttcatctgtaatgtgaatacttaacagtaaacggcgctatgtatgttgaatttctaccgattactttgtttgcacattcgtatattcgacatttaaaactaacatactctatatgatgttattaaacattattattttatctttggcaactaaatagataactcatattttttaaaagcgaatttattatcgctcaattggttgttttatagcaaaaaagtgtcgaaaatgtgaaatattattacaaaagtcgaatttttgtaataatgcacacgcatccattgttacagacggacaaccgcccatccgccactcacaaagtcatccttatattttaatatcttcatcattcattgtagacacccttgccttttgctaacattttctactcccaagcctgtaacggaattccaacgtcaaagtgttgcccatgacagacacacctaaaaaaacaaccaacagcatgagccattggttgtttcgtgtcatcttgtatgttgttgtataaccggtatgctttactcattaattacttatcatgcatccctttaccttctagtatttggttaatatacttttcaacacgcttttgtcttgtttcactgcgtttagcttgtccaatatgatatatatattgatgttgtctgcctggcgttaatttataaaatgaagactctaactgtggcatttcttcgaacttagcttctaactctttaggaataacatattcctctgttttcttcatttcaacttttttaccagctttttcagctttaattgcttcggctagataatatttaatttcttcggtacgtgcttgaatctctgttaaattttcaaatcgtaactgacgagctgcttgcaccttttcagtctgttgaatgagtgtatgatatttatcctccaaaatggcacctttatgaaataatagtgcaacataatttttgaagccatggataagtactacatttttattattcaacgtgtaacaaggatgcatccatttatacgcttcctctaattctgtttcattaaagattaacgctctcaaatatttatattcttcttgccattgactctctttatttaaaaatgcttcaacttgttcatttgattgtttctcactcatagtcatcacttccattttgtttttcaatacacattgtattatatatcctaattttataaaaaactaattttacaaatgcttttgcgttcttacaaaaaatgcatttgactattattataataagcgtataattgtcgcatattattttttgtatttttggcaataacgaaggagtatttatgaataaagacaagcaattgcacaacgacaaaatcaatctatcccaattagtcttattagggttaggctctttaataggatctggttggctatttggtgcgtgggaagcatcatcaatagctggaccagcagcaatcatatcatgggttcttggattcctagtcattggaaccattgcctataactacattgaaatcggcacaatgtttcctcaatcaggtggcatgagtaactatgcccagtatacacatggctcattattaggctttattgctgcttgggcgaattgggtgtctttggtgacaataatacctatcgaagctgtgtcagctgttcaatatatgagttcttggccgtggcattgggcgaaaccaatgagatatttaatggaaaatggctctattagcacatacggattgctagctgtatatctcatcattgttattttttcattattaaactattggtccgtaaaacttttaacatcatttacgagtttaatttctgtatttaaattaggcgtacccatgttaaccatcatcatgttgatgctatcaggattcgacacttcaaattacggccattcggcaagcacatttatgccttacggaagtgcaccgatttttgctgcaacaacagcatcagggattattttttcattcaattcattccagacaattattaatatgggttcagaaattaaaaatcctgaaaaaaatatcgcaagaggcatcgctatctcactgtcaatcagtgcagtgttgtacatcattttacaaagtacgtttatcacttctatgcctcaatcaatgttacaacatagtggatggaatggcatcaacttcaattcaccatttgctgatttagctatcttattaggaattaattggctcgcaattttactatacattgaagcttttgtatcaccattcggtactggcgtgtcatttgtcgccgttacaggtcgagttttacgagcaatggagaaaaatggacatatccctaaatttcttgggaagatgaatgaaaaatatcatatcccacgtgtagcaatcatctttaatgccatcattagtatgattatggttacattatttagagattggggtacgctagcagcagttatttctactgcaactttagtagcctatttaactggcccaacgacagtgattgcattaagaaaaatgggaccaacaatgactcgtccatttagagcaaaaattttaaaagtaatggcaccattatcatttgtattagcttcattagctatatattgggcaatgtggccaacaacggctgaagttattttaatcattatacttggattaccaatctacttcttctatgaatatcgtatgaattggcgtaatacaaagaaacaaattggtggtagcttatggattattgtatatttaatcgtgctatcaatactgtcatttataggaagcaaagaatttaaaggcttaaatatgattcactatccatttgactttatcgttattattattgtggcacttatcttctattacatcggtacaacgagttcatttgaaagcgtctatttccgtcgcgcaacacgaatcaatacgaagatgcgtgagtcactaaataatgaatcaaagtcatctcattaaatattttaaaatacagtgccatatatgatttcaacacacacacattaaccaaccattgatttcaacatcttggttggttttttattttgaaaatcggttataaataactaacataacaagatgatgatcaggctgggacataaatcaatgttctatgctctacgaagttatattggcagtagttgactgaacgaaaatgcgcttgtaacaagcttttttcgattctagtcaggggccccaacacagagaatttcgaaaagaaattctacaggcaatgcaagttggggtgggacgacgataaagaaatactttttctatagaaattagtatttcttatgcatgagttttactcatgtattcatatttttaagtacacattagctgtggctaatgtataagaaccactacataataaatcatttgtggctctttatcatttctgtcccactcccgtagaagtacatcatataatgctgaaaatggtttgagttaaaacagatatcaagctcgtctgattcagtcacaaaattgtcttgttatacttgtcacctatcatctatagaccgtggtatgattaaattggggatgataaaggaggttaataaatatgaagattaatactacaggtggtcaaattcatggtattacacaagatggtttagatatcttcttaggcattccttatgcagaaccaccagttcatgacaatcgctttaaacattctacgttaaaaacacaatggtcagagccaattgatgcaactgaaatacaacccatcccaccgcaaccagacaacaaattagaagattttttctcctcacaatctacaacttttactgaacatgaagactgtttatatctaaatatttggaaacaacataatgatcagacgaagaaacctgtcatcatttatttttatggtggtagttttgaaaatggtcatggtacagccgaactctatcaaccggcacatttagtacaaaataacgacattatcgttattacatgcaattatcgtttaggcgcattaggatatttagactggtcatattttaataaagattttcattccaataatggcctttcagatcaaatcaatgtcataaaatgggtgcatcaatttattgaatccttcggtggcgacgctaataacattactttaatgggtcagtctgcaggcagtatgagcattttgactttacttaaaatacctgacattgagccatacttccataaagtcgttctactaagtggcgcactacgattagacacccttgagagtgcacgcaataaagcacaacatttccaaaaaatgatgctcgattatttagatacagatgatgttacatcattatcgacaaatgatattcttatgctgatggcgaagctaaaacaatctcgaggaccttctaaagggcttgatttaatatatgcgcctattaaaacagattatatacaaaataattatccaacaacgaaaccaatttttgcatgttatacaaaagatgaaggcgatatttatattactagtgaacagaaaaaattatcgccgcaacgctttatcgacattatggaattaaatgatattcctttaaaatacgaagatgttcagacggcgaagcaacaatctttagcgattacacattgttatttcaaacagccgatgaagcaatttttacaacaactcaatatacaagattcaaacgcacaactatggcttgctgaatttgcatggcatgatacttctagcgcacactatcgcagtgcttaccatattctagatatggtattttggttcggaaacttacaaatattagcagcacatcaatatccaacaactgctcaccttaaatttttaagtcgacaaatgcaaaatgatttagctaattttgctaaaagcggtaaaatgccttggccgatgtatcataatgaacgtcgctattatcgcacatatcaataacgttatcgcatctaaaaaagcacacctgaatttgatagcaggcgtgcttttcatatgagaattatgatgatttaaatgttttagcataatgattatttttcaatgtgaaaacaacgattaatcctaatgcgccaatgatggcactcgtatatgtgatagcttgaacagaaacatgtgtcatgaccaagcctccaataatgcctccaacaccaataccagcgtttaaactagacatgttccaactcattacttggcttgtgtcgccttcaacatgttgaatcacaccgctttgcactgctggattagtactccattgcatgatattccaaataaatagtcctgctaacaatagacctgaaccaggtaagattaaattcataagtaacatcatgacgataaaaatagaaacagaaatcattaaccaacgcttacttgtaattttatcggagaatataccacctaatgatgttccaataacgccagcgattccatttactagaagtgctaatgaaacgaatgacatatcatgaccattagataaaataagtggatttataaagacgaatgtcactgagtttgcaatcaatactaaaaacgtaataattaaatattttgctacttcagcaggtcttaatattttcgaagtaacatgattttcatgagatggtgtctcatgattcacagggcctcgttgtatttcctgatccttcggtaaatagatcatcatcaagaagccaacaataatactcacaataattaagaatagaaatgtatagcgccaacctactaaatcgccgataaccgttccaattggtacaccaaaaacattagcaccactaaaccctgtatagacaagtccaatcattttaccacgatttttaggtgctgataacatcgctgtaatagctaatacttttacgataattagtgctgctgctgcagatgagataattctaccaactactaatattgaaaaatttggcgctacagcaataatgccattaccaatgataaatataagtaatgtccataataatacaggccttgatgaaaaacggttcgttaatttaaccagaataggtccacatatcgcaaatgttaaagcgtacattgtcactaattgaccaacgacagcttctgatacatgtaagtcctgactcatcaagttcataattcctgcaaccatcatttcaaccattcctacgataaaaatacttaaaatgaatgtaaatagtcgcatgattgacaatttaaaactcctttcaaacaaaatttccgatattcatttcccttagaataacgatttattaaaaaatgtgtgcaacacaattttatatataaccgttctattatataatattttgctttaattttctgtgcttaattggaaaattattgaaattgtttttcagtatttgaaaaattaacacaagtatgtcatttaataattatgtataattacttcagtttcaacaataactccaaaaaagcacgcacgctttatatgtcagaacagataactgactacaaagtatgcgtgcctttatgaatattttcgctgcgctaatgaatagcgatactatatgtgcgcgtcacttcatttccaattaaaactaatgcctaaatctgatgcagtaaaatctatcatgattcactcttaacatcagtatttcgtgctactaattgatgtcttgcattgaaaaattgaccatagcttaaatatgtcgcaatcaaagcagacataatggtcgcagttgtatgaataaacacgactaacaattgaaatttaatcgcttgtaaaggtggtacgccaccaataattaagcctgtcatcataccaggaatcgacacaagcccatatgttttaaccgaatcaatagttggcactatagctaaacgaatactttcacgtattgcacctttagaagccaatttaggtgtagctgcaagtgataatttagattcaatattagtaccatcttgtacgaatgcacgatctaaattctggtaagctaaattaattgcaatcaagccattatttgcaagcatgccgccgataggtataacttcatttgcggtaaattgaatggcccctgtcgcaatagtacctgcaagcggtaatgccgttccaatgaagatagctagaaatgatatccaaaacacatgatgcatcactggtgatgctcgactaattgtattccatgatgcattaataataatgaccaatacacataaaataagcagccatttatcgtttattttaaaaatataatgcagcaaaaatcccaaaatgattaattgcacaactgctcgtaatgtcgcaacaattaaatctttaataatatgtaaaccttctttatatgaaatgataatcggaatgactaaaagcaatgccgtcaatccaagtgccgtattactcatgttgattcaactcctctgtattagaaatttgaccatcaacaattgttatacgcttttgaaagtgtcgcatactttggtcatcgctgtgggtaatccacataattgccacgccttgatctgctaatttaaaaatgatattttctatcttttctttattattaacgtctaatgcactggtcgattcatctaataaaagaatatccggtgtatacatcagttggcgcgctatagcaattctttgccgctcaccacccgacatattttccacttccgaacttaattgataatgtcccaaaccgacatctttaattaattgctttgcacgttttctatcaaatttatcattacgtgcaagtgatgggaatatcatgttatcttcaatcgtttcaccaaacaagtcactttgctgcatcaaataactgattcgttgacgcaattcttccgggtcataatcattatagggtttacctttaaaataaagttctccactagttggactaaacaaattacatatttgcttttgaaatgtacttttaccactacctgatggacctataatggcaatactctcgcctttatctacttttagactgatatgatctagtatgattctatcgctcgctttatacactaaatctttaatttctaacaacatttgcaccgctcctcatgtaatatatcaggtatattattcccgtttttttggtttttagtgcaattacatttaagaaaaaatcattttcttgtaatatcaaaatttaggcataattgattttcagcatttaaattaaaaacaaaaaatcctattaacatggatactgtctaatgactaagaattaaaattagacaattgtttaacaacctaccatattaaaaggattctttattatttatggatttgattaccacatgatatttttataactttcatcattcaatgaacggacaatttcagtaacaagacggatagaattttcataatcatctacattgagcactgaaacattagaatgcatgtatcgcagcgtaacaccgattgtcatcgttggaataccttcatttgcgacatgaatacttcccgcatctgtacctccacctggtgtcgtatcccattgtacttcgatgttatgttccttagctacatctttaatatgctttcgcaaaccttggtgagcaatacttgtagcatccatcataatgacaactggaccaccgcctagtttactatcgctcgtttgacctgacatacctggggtatcataagcaatacctacatcgacagctatcgccaagtctggtttaatcgtattcgctgccactttcgcaccacgcaaaccaacttcttcttgcactgtggcaccactgtataagttaatgccaatattttcatcttttaaacgttttaatacctcaatagctaatgcacagccatagcgattatcaaatgctttcgcagttaaatatttatcatttgcaagcacttcaaattcactatatggcgtaaccatattgcctacttcaacgccagcttcttcagcttcttccttgctactaacaccaatatctataaacatatttttgatttccattggctttttacgttcttcaggcgttaagacatgtggcggtttagaaccgatgatacctctaatttctttgcccgaatctgttgtaatcgttactttttgagatagcatgacttgattccaccatccaccaactggcgtaaatgaaataaaaccatgtttatcaatctttgttaccataaaaccaacttcatccatatgaccagaaatcataattgagtattgaccattctcagcatttttctttccaaaaatgccacccaagttatcttcaataatttgatcactgacaggctctatatagttacgcattgcttctttaacttgcatttcataaccagcaatgccgtttacatctgttaaatgtttaagtaatttgactgactgattcatgttattcatcctcctgtatttcaacttaaaactattgtatcactaactttcagaaaaacgttccctaccgctttatcattttcaggcttaaatatttttaaaattttgtgaggaatccgcttaaaaacctcatatttctaaaatttaatattccgaaaaagtcacaatttaaaattccttattataatacgttattcttttattgttactaatttcaatctgtttagtcttgcgctattataaaattaaaaagtgtagagataacaacgcattaacgtcgctattttccctacacttaaatactagtttctttaattaacttatcattaaagttattcagatattgaatattcattaatcataatgtgaccatgccgatagtattaatacttctttatttcgatcatctacggtatagacgaccctgtgctgatggttaattcttcttgaatatcgctctaaatatttaggctctaatttttcaaaagattgtgttattttatacggatcattttttaaagtctcaacaatttctaaaaatgacttctttaaataagaatgttttattttctttaaatctgatttcgctgaatttttaatcttaaccgtgtaattgctcattaaagattatcccaatcaatatcatctatatttgttgtaccactattatctttttctctttctcttactttgtccattgtaccagtagattcaagatatattgtctcttgtatacttttccaatcttctaaacctataatcacagcattattttcggcattattgccactaatataaattggttcgtgattattattaacattttttagtaattgataaaaatcttttctcgcttctgtagggctagtgataatcatataaaccctcctttgttttctgttacgctaattatagcgtacgcacttgagtacgtcaatattaccaacgagttcatcgtattcttaatacctatatgctatcgttcacaaacttttgttcttttcttccaacataccgcctataatgctcaaaaagaaatcagcagtggaacacactacgttccctaccgctttatcattttcaggcttaaatatttttaaaattttgtgaggaatccgcttaaaaaaactcatatcttcaaaaaaaatgacaaaatttaaatttttgaataacatcattttttagtaaatgttataatttctttataatacaaatatcgaaagaaggcgactgactttgaaaaaattatgttcattaattgtagtagcattagtttgtatcattgcattatcagcttgtggtaaagaacaaaccaaaacatatgaaggtgatgttagtggtaaacatgtactaacttctatcacatataaagatgataaagttttaaaacagtctacaatcaacacaattaaatatgacgatctaggtatggataaagacgaagccaaaaagttattcgccaaatctgaaagtattttcaaagaccttaaaggcgtaaaatacaaagtagactataaagataaaaaagcaattgaacacttagacatagattacacagaagttgacatgaaaaaattaaataaacgtcttggtgtttcgactaaagaaaataaagatattagttttgaaaaacttgaaaagcaattaaagcacagaggtttaaaagaaaaagataaaatggacgacaaatagtttataacttaaaaatgccctcagataagactaaggttacaaaccttaattcatattctgagggctttaatatttgaagttcttgtgtgaccagcatccactactaatataaaattatttgcagtaacgctaaaatccgctgctttcaatttcccgaaataattaagttaactaatgagttttaatttataatcatgtatcgtttgtaactcaccatcgacttttcgatatacaatatgatcagcagtaatttctgtaggactggatacgccaacagctgctgcaatattgaataagccttcatgcaaacttgttacatagtttgtgacacgatattgcttttctccaacaatcaatgctttttctttcttcgcatctgtcgttgcaacacctacaggacacgtattcatgtgacattgttgactcattatacaaccgacactaatcatcatcccacgtgcgatatttacaaaatctgcacctaaacctagtgcaatcgcaattttatctggtgtcactaacttaccagatgccgccaatttcactttatctcgaataccatatttttctaacatgccagacacaataggtagagctgtaaatagcggtaagccaacaccatcttgtaattcttggaatgttgcaccagtaccaccttcaccaccatcaatcgtaataaagcttggatacttatctagttccaccatcgtacgtacaagtgtttcaatttctgaaactttgcttactacaattttgaatcctactggtttttgacctaattgctgcaactgatcgacgaaacgaatcaaatcttcagcattatgaataaattcgtaacggttaggtgaattgattgttttataaggttcaacatttcggattttagcaatttcttcgtttaccttttcagcttccatatgaccaccacgagtcttagcaccttgtgccaacttcagctcaaatgcgcgtacgttagataactgtgcaacctctttaaataaaccttcactaaaattaccttctttatcacgaacaccaaataaaccgggaccaatttggaaaatgatatccccattaccttttaaatgatattctgataagccaccttcacctgtattcatccaagtgcccgctttagctagacctttagataaagctgtaatggcattttttcctaaagcgccataactcataccagattgtcctacgatacgttttaaaataaatggatgttttaaatgttcacctaattttattgcatggtcatcacttaagtaatacggatcaatctttgtcggcacacgatattcttcacgactaaataaacgctcattcgcgattttataaatgaatgttgataacaatgttgtattatctactgaaatctcattacgttgcatcggaaacattgtgttctgtatgtaaaagccgtcttgataatctttagtagtaccgaagctggtcatacgagagttatattttccagccaaaacgatatttttataatcattacgtgaaaaaggtttcccttcattatccccagaaaataaatactgacgtaattccggtcccattttttctgaaatatatctaatacgtgctagtaaaggataattccttaatacactatgttgtgattgtcttttatctttaattaaccaaataagcccgataacaataaccgtaagcatgaatcctacaacgataatgttaactataaattgcatgactgtaagaaacgtcattacaatacctccccccaaaatttcaattcaatatttatgatacaccttacaaaacaaaacacaatggaagcgcttcattttataaaacaattttatgatatgtttttcattttaaattttaatgtataaaacatacaatacaaagtaatatgtgctaaagtatctatataatacaactatttaagaggtatactatgtcaaatacaaataaacattacatagaagaagaatacgctaccgaacaatcgcgttttttcaaacgtgatattggatttattttcctttacatatttttggttaacatcttgccgatcattatcgtctttttaacttttgggttagtagctgtattcactcaacaagctccgtggggtttctcttttcctatttcaatgaacattagctatttactcgcagttattatttcactagctatttttcgtctgatgcatgaagatgcgtttattccaatgatacgttcgcaaatcgttgctagtgctaaatataaatggcatattcttatatcatttacactaagtgtcgtactctttttacttttaaatcatttcaatattttcgcactaaatgtagattcctttactgtctttgacatttacccgctcattaaagggtatggttccatcagtttaatagctatattttcgttaaccattatattaaatactttgatttgtcaacttattttccgtcatattttaattcaagaattaagcagattaatacctttaaagattacaatagtattgtccattatccttgaaactctgttctactatccatacattaatacatggtgggaattcattccagcattgatactagcaggtagtgcgacttacttatatttaaaatcataccgtaattttatggtgagctatttctatcaattagcagttatactcgttttgcatattttcatgtaaaatttttcagagtattatccattatccatacacatcaaaaagcacacttaaaagtcagtatcaaaactcacttttaagcgtgctttatttagatatactgtcgttctaaaaacgagccatatagaatgtttcatgtcctagcatgaaacacatgaatcgccatgctcaatataccttttaaaatttaaatattcattaacttaatatgctttaattcacttcattaaagactactcgctggacgtggtgttggctttttcaagaaactcataatcattattacaatgactaacataccacaaattagatacatccatttaaatcctactaaatcggaaataggtcccatcaatgcgccacctaacgatatacctaagtctgcacaggcaataaataaacctaacaacatattacgacctacttttggtaagacgaagcttaagtatgatgttaatgttgggtacaccattgcttgcgtcattcctattaatatcgcactaccatagaaaataattgcacctacttgcggaccaaatgccactacaaatgacgcgattactaataatgatagtacagataccatatatttaggatgccacataccatctgacggaatgtatttccttaagtaaaatcttgccgcaacaactgcgatggcctgtattgtcaaaaagattcccgcattcgcgaatcctaaactcactgtgtataacggtacaaatgtactaactgcaccaaatacaatcgatgcaacaatcatgataataccactgttcaacaactctttatttttgaaaaattgcgcaaaaacagttacagcgttaaacggcattttttcaatcttatctgacgtatcgggttcctgttcagcaaaggtcacgcgatagccaaagaatgttgttgttaatgcgataaagataatgacaattgcaaatagtgaaatattatttgcattccaaatacctacggcaactaatggtccgattaagtttggaatcgttgaaaatagcgagtacaatgatacaccttcagaacgatgttcctctggtaatgcatcaataatacctagctgtaaagacatagaaaagaatgccgtacacacaccttgcataacacgtgctacgaaataaccttctaagccagtaaaaccataaataattaaagctatggcattgataatcaaaataattcttaatactttaatgggaccgacacgagcaataatttgtcctgcccatggtcgaaataccattgctgttaacatgtatgcccccataacgataccgataaccgtattcgttgcgcctaaatcatgccctcgtaaaggtataaacacgtttaagattgcattggcactaaagaacatcaatgttaatatatataatctcaaaaagggccaagccattgcacctttcattatctcactccttagaatgatagttgtttttctattaattctcttgtataagcattgtcacttttatgcaatgcgcttgtcggaatttgttcttctatttttccgtttttaaaaataattaattgatcacataaatacgtggcagcttgaatatcatgtgtgataaaaatataactcaactgacgcgtttcacgtaaatgaatcaataaatctaatatttgtgtttgaattgacatgtcgagtgaactaatggcttcatcaaacaaaatatatttagggttaatacatattgcacgcgcaatcgcaacacgttgcgcctctccacctgataacatattaggatatttatccatgtatgccttagatagaccgacttcttccaacaatgtaattgcttggacttccataacttctttaggttgtccatcacattgacacatcacttcaaataagatttctctaacagtctgaaatggatgtaatgatgacgtataatcttgaaatacagcaccaatttgatgacgtctcactttcttcttatgcatcggttgatcatttaaggttacacaacctttatccggtttctcaatacctaatatcatacgactcaacgtcgatttaccgctaccactttctccgataatcgcaatcgtcgcaccgattggacactcaaatgacacacctttcacgataggtgttcgacgacgcttaaaaacatgtgcgctttgatatgacttttcaacatctttaattttaatcatgtacatcacccctcatcacatgtttaaaatgatcattaatcttcttcttcgttgataataaatacttcgtataaacatgttctggatgatgcaagactgattcacgtgtcccttgttcaataagctgaccatttttcatcacaacaacacggtctgcaatcttgttaataaccgttaaatcatgtgaaatgaaaatcatcgcacagtcaaagtgttttttaatatctataaatgcttccagtacatcatattgtgtaattgtatctaaagccgttgtcggctcatcagcaatgattaactttggtttcaaagctaacgctaaagcaatcatcaatcgctgtaacattcctcctgataacatgtaagggtatgattttaatatacgtttaggatctttcaaacttaaataatccatatattcaatcaatgtcttttcaatttcttgtgtagacattgacgtatgtgctttcatagtctcaaacatttgtttaccgacagtagttgatgggtcaaaggcacgactaccttgttgcatgaccatcgcaatgtctttaccacggtactttttcaattgcgattcagataatgacaacattgatgtaccatcaaagataatttcacctgtcaccccgagtcgttcgggattcaaaccaataatcgatttacaagtgattgatttaccactaccactttctccaataacgcctaaagtttcacccttagttaatgtaaaattcacatcactcacgagtggttgatctgtccaggtatctgtaatcgtcaaatgtttaactgttaacaatgtcatgattgcaccactccttttttcacagaacgaagtttatctttagaagagatgcggggatcaatagcaatttgtaaagcatcggataagaagttaaatgccatcactataatcactatggcaatacctggcgcaaacatcatttcaggatgtgtaaacatcacttttctagcttcgttaagcatcatgccccactctgcagtaggcgctttgacacctaatcctaaaaatgaaaagccagatatttgcaagatcattgaacacatcgagctactagagatgatagcaatatctgctaatgttaatggcataatatgtttgtgaataattttcatatcattcataccgattgttttagcaaatcttacatggtcagaagcagtgtactgcataacacttgtacgtataacacgacagaaccatgcccaacgcgtcaaaataaatgccatgataatattttcggcacccattccaaacaatgcaattaatgctaacgttacaacataacttgggaatgccaacataacatcacacgcacgcatgattaaggcgtcaacaaacccttggaaatatcctgataagaatcctaaaatagatccaataagtacagaaacaaatagcgcaacaaagacatataacaaacttggtctaatcgcataaattaacctagttaaaatatctctacctaaatggtcagtacctagtagatgttgaaaactcatgccagcaaatttgtttgctgtatcgatatggttaggatcataaaatgtcacaagtggtgctgctaatcctaaaaagacatataatacaataatgcctaaagcaattactgcacctttatcttgtaataatcgttttaaaattatcatcgtgcgccctcccttaatcttggatttaatagcgcattaatgatatctgctaatgtattaaatacaataaataataccgctacaattaatacatatgcttgaatgactggaaaatcgtgttcaagtattgcttttaaacttaattgacctagtccaggccatgcaaagatatactcgataacaactagtccacccattatcattggtatagacatacaaaagattgataccgcaacttgtaaagcattacgcaacacatgcaacattaatgtgatagatttcacaccgcttgctcttaaataaagtacataatcttcatttaattgttccaccatcgagcgtctaacatttctaaagtaaataccagcataggcaatcgtaataacgatcactggcaatatgtaactttctggacctgttaatccagaagtcggcaatatgtttaacttcactgaaacgtaaataataagtattgaagctatccaatatgatggtaatgcagttagaaagaaagccactgaacgtatcgcacgatcagtgaactttcctctttttaatgcactaactacacctaaaataattgatgtaatcatcaccataacacttgaaattattgttaatttcaatgtattcataaatgctggaccaatacgttcagcaactgggtcacctgtaatgtagcttgtaccaaaattaaattgcatcgcttcaagtaaccaatttttatattgaattaataatggatcattgaaaccgtacttctcattcgtttctgcaatcaactctggtgttacatttggcgtcccttgtgcatgtaaaattgtcacagctggattttcatttgtaatatacgtcaatagaaatgtcataaaacttactacaatcatcaatggaaacatgagcgcaatacgttttaagataaatttgaacatctaattgctcctttatttatactgcatttcattgaatggtaattcatactgtgattgtgtgaatgatactttttctaaatcttttggtgcaacaactgtcatactaccgtgtgaaatagggataaagataccttcatcatcaatttgtttcaaaatgtttttataagcgtctgaacgctctttaccgttttggattttaaatgcgtcatcaatgctgttgtatattttatctttgttctcaatgcctgatgttgcactttcataaccatttttctctttaaatgctgcaatagtactttgtggatcgtacaataatccccaagtttggttgaacattaagtcataatcaccagaagtacgacgttcagcaattttatctgatgtttcgccattgatgtttaacttaatacccattttcttaaattctgcttgtaagtattctgcttgttctttttgacttgaagaacctttgtcatagtacattgccatttcaaggtttttaccatctttttgacgaacatcgctgtctttacctttcttccaaccagcttcatctaataatgattctgcttttttaaggtcatacttacgtgttggcatatcgaaattaatgtctgttacatttttcgcaaataattgagttgctggtttttcttgaccatctaaaatttctttggcaattttatctctgtttaccatatgaccaatcgcttgtctgactgttttgtcactcacagcgttatcttttttaccagaattgacaactaacattttcgtattcataggttgactacgcttaacttgatagtcacctgtatctttcaattgttttaaagagtctttgtctaagctatctgtacctctatcatctgtgaaggcaaagttcgtttcaccttttttcattgataggaatgctgtttcaccagcaggcattacttttgcttgtactttgttaagtttagacttttcgccccagtattgatcatttttgttaaagtctgcagactcatcttttttgtgttcacctaatttaaatggaccagtaccatcgaactttttaacgccatcttttgttgtaccgtttttaaagtcttttggagacacaaatacatatggacgaggcatcgctaattcagccaatgcaggttgatatgcttctttcaaattcaattcaaccgtgtacttatctttaactttaacattgtcaattaatgtcgaaatctttaaccaagaatgcaattttttgttttcttgaactgcgtcaatatttttcttaactgcgtcagcatcaaatggcgtaccatcatggaatttaacgtcatctctcaaatggaacgtgtatgtcttcccatcttcagacacatcccactttttagctagtaaaggcttaataccatctttcgtgttacgtacaagcggctcgtatatcatactttcagcagacattgatccaccgtaaacatgcggattcatatcaccgatatctttaaccgtcgtatacgttaattgcttgttttcttttttctcctctaaacctttattaccgccacaaccagttaaaattagccctgatgcaagtaacattgcactcattttagttagttttctcatttgcttttcctctttctaaattgataagttgcattacttaatcaaatcgtaatgattatttttctcaattatttgcttatttttatgtaaatgtcaaacataattcaataatttttttctattataaaacttcaaacccttattatgaaagcgttctattgatttccaaaaattttgtgacgagtgctttatctccttcaaatagatttgtattaaattgagaagataagtgttgatcttgatgcatatccttgtacgcctggcaacttgcttcatagcgagttaggaactgatcaatcattggcgttttgatacctagcattttcccaatatgctgaatcatcgccgttctgtaataatcttcacttggcattcttggaatttgaacaacatcctgttcatttttatagacttgcttaaatggtacagctgaaaaatcaaagtaatgtccgttttcgtctggctgtgaaaatggatcaatgaggattgcggtatatcttacataaagcagatattcttgtaagatatctggcaagatttcgaaatgctcaatatcaccttcatccaaagtttcaggacgtactggataattttccttcaccataaattgaagcaggttgactgacggcactctaaatgcttgtaaaataaccatcatttccttccacattaaacgcatttcacggattagtgtcatcgttatcggtccttcaggaaataacttatacacataaaccggtacatctgttccttcgaaaatggctttcaatgaaaagtcattcataaatagtggtgggtgcacataaagcgaactgtttcgcgtttcagcatgcagtggcgattcaacgacttctaattgaatcttcaattgctcagctaaagcagagattcgttgacacattgttgagtttgaatgtgtcgatcccatgtacaatttcttttttacacctgttgtcaacacatgattaggcgcttctttatcaacaatacgtgtatcgccaagataagttgagaatgaaatcacttcgatatctttattaaatttagacataaattgttcgacaatcatttgcgaaccaaatgtcggtgatattaaaatgacatgtttgacactttgcaaagtttctaacgacaattgctgtagtgtgtcataataagcatctgctgtgcatgccatgacaaccgtttcgtattcacccttaacgtttttaacatctttatacaaacgattaatttcaaacttaccttccagatgttgatgcgcctcgttttgtattttgacttcaaattgtttctcttttttatacgcttgatataagcgttttgatttttctgatgttgaggcacgtccaaccatatcaatctcataatctgattttaaatagcaaatattcgctaattggattgcgaccggaccagtgcctatcattaataatttagacatccgtaatacctacctttatagctgcttttttataaagtgctatatcaaaaatttgctgtggtctcatatgtttattcacacattgccacttatcttccgctgtttcttgtgacggataattaaatattgctttgatgccatcaccaaagcgcattgcaactacgacattttcatttgttaaatcatataattcttctaaaatgctgtactttaaaggaattgtcgagctgaatatgatatgcgtcacatctttgatatctttaagttcagataccttttgatccgtaattgttatatcttcatttggtgctaagacgttaacgattctgcgccctaggtcaacggcttgtggatcaatatcaataccgataactgaagcacctgtttcttttgctacttgaattaacgtcattggatatgcacctgaaccaactaacaataatttgtcattgctagctatactacattgtccaaactcttcatcaatacaatgttctatattgtcaaagtaacctgtggtagacgcctgtccgtctaatagacgtctcgctctaatgacttccacttgtttaacacactgcgctgtaatatattgcagtgattttattaattgtgctttttcttcaacgtcacgccaagcattaaattgttgttcataaataggatttaaaataaattcactatagtcatccatcaatgtttctaatgcttcgatatattgatcgtcttgtaatacacgctcgtaatgcgcttcaaacttttctaaatattgttgtaatatcaatttgatttcattattaaagttattcattgtaggctccttattctatatatgcttttcctgtagctacagttgtaacctgtcctttaattgaagtttgatatcccaattgatgacatcgctttgatgtcactaaaatactgccccctggctgatgtactgtaaaatctttgcatgcgtcattacgttgataattattaaaaaccccaattgatgctgtaccagaaccacagctattttcccaaattaaactttgaatttctggtatatagattaatggctgtaaaaattgacgttgttcatcaaaaagcatcatacctactgttttatatttgtgactccattgttgctcacgcacaaacgcttcaaccaaatgttgaatttctgttgttacttgtttaactggaatcacataatgtacatatgtttcataaataatttctattgctttccatgaatgattacccatattaattgttgttggcacaacacgatgggcttgtggcatttgaacttcatagtattggcaatcatgaattgcgcattgcactaaatccgaacagccagacaccttcaccttaaactgttggtctttaagcaaatgactttcctgcaaatgatgtatatatgacatcgtcgcattaccgcaaaattcattaccgctcataactaagtgaaaatcattaccatcatcattttgtgttgattctataaagcctacctgttcacagcatacatgtgttgcggccatcaactgattggcgatagatgcatattcactagcatcatgttttgaatgaacaagtatcgtcatattccccgaaggattatacttagaaaattctataacctgccgattcatacgacactcctttagatgtatttttagagcctctgtaattttaattactagaggctcttatgcagttgttgcgaagcaaacaactgtattcctctaaacctgtaattttttagaagatgaacctaatagctctatctagtaggtaagtcatgctaattcgcaaaagcgaaaaccatggctcttatgcagttgttgcgaagcaagcaactgtattcctctaaaactgtaattttttagaagctgaacctaatagctctatctattaggtaagtcatgctaacccgcaaagtggaaagcatgacttagtaatcggttgttgtatcaaaatgcaaccgtaaaccttatttaaagttgcttcttgtggctctacaagcgaatgcagttgtccgttaactacattcacttagatgcttttattgttttcacctcaactaaaacttcaaaaaagttgcagaaaacaaatcgtaactattacgatttgattatatactatattagttgagaatcattgtcaataaaggttgtaaatgaatgcacatttatattttgataatccttccataaacttcgtattctcagcacattcaagtctttttgaaaatttttatcaataattgagtagaagttccgttctagtcagttcaaaattttacgtaagttgtctctgcgtattgctttagtgagaataacccacacttgtggaaacgtccttttgttaatctacaatggatacccttgtctttcgctaacatttcctattaccaatcctgtaacggattttcatcgtcaagttgttgcccatacaatacgcaccaaaaaagctttgtacaatttcgtacaaagctttaaaaatttaaataaaaatatcattgttttaatgaactagccatatcagattttatttcgtttgctaatacttgtaattcagggaagtaattattagcaaagccaattattattttattttttacaaacgtgttaatctctcgatcttctggaatcgtattttctattaaattcaaaagctcactatgacttatgttctctatacttactgtatttaaatattttaaaatcacaagatacaattcatcaaatacttcatgttcaaaatcaaagtccaataataataaactaacggaattagtttctaactgattatctccaattttatctgcaatctctcttatagcttgatatagcaatctaaaactttctttttcttttaacataaaattctccttaatttattagaatagacaaaatacagcttattttaaagatactccaaaagtttgaactcgagattctgataaattagatgcacgacctacaatacgttaaaacaagctttaagcaatacacttcaaatgaacaatatgtgattttcaaagattaattaatctccgctttaaatgtctttcattgcgacaatatgcatacattgcctacttcatgccaaattcttttccactggatatcgattttaaataattattccaatgtccgcttccacgaatcatcacttaacatctcgccaggccatgtgtaagccatcacaccaccatcaattcgaatcgtctctccagttatgaatgaactgtcgtcagatgctaagaagactactaatttagcaacttcttctggtttacctaaacgtcccagcggagtcatccatttttgattttctctaaatgttttacctgcatcatcctcactcgtacctgtcagtttatctactaacggggtttcaattgtacctggtgcaatcgcattggctcgaatgctatcacggccatactcaattgcgattgattttgtaaaattaatcactgcacctttcgcagcattatatccagagcgatacaagtctgctgcttgtccggaaaatgaagacgtattaacaatagagccaccttgattcatcattaaaggtaacatcattttcgtcattaaaaatgtcccacgcatatctacattcataatcttgtcatacacatctattggatactcatgaattctatcagccgcattatccacaccggcattattaaacaacacatcgattcttccaaactgttcctttatgtcagacacaaagtctaccacttgttgttcgcttgcattatccacattatacgccttcgcattgtcaccattacttttaattttatcgacagtctccgataccgcttcagctatgtctaccgccaatacatacgcaccttattgagctaaagcgattgcagaagcttgaccgatacctgtacttgctcctgttacgactgctactttattttccaaacgtttcattcagtcactcctatacaacatatcttaaacttacagtccttattttccactgttcgatgcttcataaacctaatagataagtcttcaggcagtcttaactactctgctatacactttctattgaataactcaaaatatttaacaatattagtttttttatttcctgaaaattgttacttttgagagtattttttgttacactttaaatatttaacaaaggggggaataattgatgacatcaaaacatcaacaaaaggggtctatcgtcaatcgtttcttgaatagtgttgaaaaaatcggaaataaattgccagatcctagcgtcttattctttttaatgtgtgtgggcttagccattatgacatgggttatctcattatttaatgtatctgttaagcatccaggtacgcatcaaaccatttatattaaaaatataattagccatgatggatttacgatgataatgaatgatacgattaaaaatttctcagagttcccagcattaggcttagtactagcagtgatgattggtattggtgttgcagagaaaacaggatacttcgataagttaatgatttctgttgtgaatcgcgcaccacgtttcttaattttaccgactattatattaattggtattttaggtagtacagccggcgatgctgcgacaattatcttgccgccgcttgcagcaatgctttttattaaaattggctatcaccctatcgctggactaacgatggcatatgcttccgctgttggaggatttgcagcaaatatagttgttggtatgcaagatgctttggtctattcatttacagaaccggcaacacgtatcgtttcagattctattaaaacaaacgttgctatgaactggtactttatcgcagcgagtgtcgttgtattacttcctacgatattgctagttacaactaagctcattattcctagattaggaaaatatgatgacagtttaatgcatgatgaccatgaagaaacatcttcacatattactgacaaagaagcacatgctttaaaatgggcaaatatcagtttcatagtcacaattattttattaattattacagccattcctgaacatagctttttaagaaatgctaaaacaggcagcttactagacgatgcgccattaattaacggtgtcggattaattattcttgtcgtatttttagtacctggattagtttatgggattttaagcaaagaaattaaaaatacaaaagacttaggtaaaatgttcggcgatgctgtaggatcaatgggaacatttatcgttattgtgttttttgcagcacagctacttgcgtatttaaagtggagtaatttaggaattatcgctgctgttaaaggtgccaaattattagaacatcaaaacggtattgtattgatactaggtattattgtactgagtgcaatggtcaacatgttaatcggaagcgcatcggctaaatggggtattttaggaccgatattcgtaccaatgttaatccttatcggctttcatcccgcattcacacaagtcatttaccgtgtaggcgattcaattaccaatccaattacaccgatgatgccgtacttacctttattattaacttatgcacaaaaatacgataaacgcatgaaactcggagccttactttctagtttaatgccgtattcaatcgcgctaagtattgtatggacagtatttgtcatcatttggttcctattaggtatccctgttggaccaggtggaccgatattcgttaaataacagtattcaaagggataaattaaaatgccactatacaagatttgacctgtatagtggcatgatttgttatgatatagcgttcgagatgaaactctgcatttatatgaacaattatagtctatcactaataatatttaatctgttccaaccgttaatttggtttacaacaaagacaagatcaataatttgttcttcatcataaaatgattttagccggtcaataatttcaaacttcttaaagtctttgattgaatttaacatttctgcaaattcaagcgtcactttttcttgatcagtaaataaatctaaatgtctaaaactcaagacttcatcaattttcatttgtgttacacccaattcctttaattcttttttatggatatcaacacaataatgacaaccgttaattttagaaattaataacttaatcaatgcactaagttcatcattaacgggtgattgatgaataaacttttcaccttggctcattacagacattaactctccattttgtttcttgtaattatacggcatttgcaatctctcctttacattgtttaataccaatccagtgatactacacttcgaacaatattggatagaatttgaaattctgtataacatcttgtcaatctatgctttagttaaaacatttagcacttatatttaaaaaatatataaaatatgaaaacagattgaaaggatattataccttgctctacccttttttataaaaaatcacacacatttgagaaaatttgataatgtcaataaatcacgtcatcgacattgttattcgatatatattgttcttataatggccaaactattattccatttaaattaacgtggttcgtttgtgttaatgtactgtacaaaactggggaagtattggtgatgatgaagtgatttatattaattgcgaaacaccttcgatagcaatgacatagattattggaagattaaatcaaaaataaagaagaccctagtggccttcttttttatctaattcttctttgattttttctggtgattttctttcatgtgctggttttaataatttatctactccttcactttttatcatagcgccaccaaattgataattatgttcaggcgatgcataagcagtaaaatcatcttctttattttcattgatgtatccttcaatcacagcacttcccataggacttgtttccaagtttgtgaaatgtacagatttaatcgtgttcgtttctttagtattatgcttaagatagagtgtaatacgttcttgttgttctttgtagtaaatcgctttttgtttttctttttcatcatatttcattttaaaatgcatgaccgtagaaactgtacatatacacaatatgacaccaataattataaaaacatgttttttggacattaaagtaactcctaactttagtgactcttctttttatttagttctttttttatatcatctggtgattttaactgattggctggctttagtaactcgcttaatttttcactttctatcatagcaccaccaaattgataattatgttctggtgtagcataagcagtaaaattatcttttttgttttcatttatgtaaccttcaatcacagcacttcccataggacttgtttccgagtttgtgaaatgtacagatttgattgtattcggttctttagtgttatgcttgagataaagtgtaatgcgcgcttgttgttctttatagtatattgctttttgtttttctttttcgtcatatttcacttttaaatagatacctgcaacactaattaatatgattaacataatactagttaatattaaaattttctttttcgacatctatcaccagctcctaaaatgtggtggaattttatacagtttacatatttatgatactacaaaacacactcttacaaagaaaatctataattttaatctaggtcaaggaaaagcagccaaaagtgtttatataagatcaacgaaatattgcgggtataaagtggttaacagataaatacagtggaaattgtactaaaaattcaacttttcatttttatatgtaagtatgattaacttgaaaacaaaattaaaacggccgcatagttttagcggtcgttctttttagactctaattccttttttatctcatcaggtgatttggtttgatgtactggttttaataacgtgcttaaatttttacttttgattaaacttccaccaaattgataattatgttctggagacccatatgcaacaaaatcatcttctttattttcatttatgtaaccttcaattactgcatcgcccataggtcctctttttaaacttgtgaaatgtacagttttgatggtattgggttctttagtattatgcttaagatagagtgtaatacgctcctgttgttctttatagtatattgctttttgtttttctttttcgtcatatttcacttttaaataaatgactgatgcaactatacatatacataaaatgacaccaataattataaaaacatgttttttgttcattaaagtaactcctaaaatgtggtggaaaatgaaaaaatttttataatctataattatgaacattacagattataaaccataacactaacatcgtcgccttcattaacttgattgttaaaatcagcaattactgagaattgtacaaggaataattgcctattatgccctcatgtaattattgccttactaacattaacaaaatcgatagctattacattaaatgcctataccccagacctcaaacacctttttatacaggacgcactgtaatttcattcacgttaacgtgctttggttgtgttaatgcatataatactgcttctgcaatatcttgtggttcaagttttttacgatctgttggattgtatgcggcagttatggctgtatctaccattcctggagaaatgcttgttactttaacgcctgtctttgccaactctttttctaatccttgagtaatagtgtgaactgctgctttcgtcgcactataaatcgtactacttttcgttacttcaaagccagaaatagatgcaatgttaataagatggccacttgattgttctaacatagttggtaatgcagcctgtgccgtatataaagtgcctttgatattcacatcaatcatactatcccactcatctacttgataatcagtaatcttagacgacaacatttgccccgcactattgataacaatatccaaaccaccgaatgtttgttgtgcaatttttatcaattcatcgacttcttctttattcgttacatctgttggcactaccttcacactatcttgtgacaattgattcgctacgttttgtaatttttctttatttctacctgctaagacaacttttgccccttcttcatgtagtaatgttgcaattgcttctccaataccactacctgcacctgtaactactgctactttatctgttaatactgtcataatgatcgactcctttgattctttttattttttcagggtaaatcataaatacatattacttttaaaaagcgtatcacaattcatataacggtcataataactcgcttcattttcatagataaattacattacaagccattcgaaacatacaattaatcgttgcttatattttttatttttaaaaatgttgaaaaatcgtcacttctttattgtaaaaacattatattagtaataaagttaatactgtgatttatcattcgattgaatgattagagggaggaataaaacgtgacatatcatgagcgtgttttagcattaagagcagaaagtaaaagaaccgcatttgattttcgattcgaagatttatttagcaaagaagaatggctaagtatgtctcttgcagaaagacaaaaagctgaaaaagcatttcgacacgaagttaaaaatatggacgatgtaagaatgcccttctcaagtgtccatgacgcccaagtaaaattatataatgttgtatattcttataacggcattaaacgtaattttaaacaagttgaaaatgaaggattctaatatcatttcgtttatatatagcagacatgatagaattttatatgtaaatcttgtaggtaatcgttttaaaaataatataagtatgactaaagccacatccaatataggacgtggcttttagtatcgttccagatttgtggggagttagggtttacttaattaaaggggtctgccctcaattgctcaccaacgagggcaagttacatcaatcacacttcaattgccgccgactaggggtagtaatcattggcaataagaactagttagtgactaacgatttacgttccatagcaaagtgatacaaacgctcagcatcaatgtaaggcatagaatcaatagttaggtaaccatctttgatgtcaccaattaatccttgatttacaccagtgttcacgtaaatatcatagctacttacgtctgagaaaataagcgcttcaatctcttttctcataatcatcactccaatgtttatatagtatttatataaactctctcgtctctctctatttattaacttcttacaagtctaatattacatgaatttccaaataaataaagggatttgtgatgtatttcacaaatttatcactattttggaaaattaagaaatatttaattatataaaagtttaataagtcagaaaatatgataaaatgtagatgttctttagacattaaaagcttctaacatgatacggaatatgaggttcctgtatcacattagaagcttttttgttgcggtgcttatattaataatggcatgaatgaacgcatgctgtcttagctccaagaatcatataagctattaaacttccgttctttgaatattttttaatttcttactaatatcatccagttcattcttcgcctttttaacccaatctccttgagctacattatcaaattcacctttaaattttttgaaatggctacctatatttcacagctcactttagatatcgaacttgtttcttcagagttacttgttatattaccaggttttatttgatattcagtttgactcataccttgtatcctcacttggagtatattgtacagaatctgtaaaataaatgttttcttctttattttcgacaaaggtaaattcaagacttctagaacctacggatgaaccttttaaatctccatcgcctttcaataatagtttcggcgcttgtttggttggaatatcatatctttttcttaactgttggacattataatcatcattattcaattgatattttgccgaataacttggtacattaggattatatgaaatatcaccatctttataatcattaatatctttaaagttgccatattgtacaaagaacttaaagttttcaatctctttttttaacttgtcattcggtagtggcttcgttggtatgattttattatgttccatttttaccggataccttttttcatcatcctttggtctgccgttactgtcatctgtcatttcacttataaaataatacccttttgtggttctagtattgcgattgatatagagcaccattcctctcgtttccatatccttaccttttggctcgattaccatttcagaattaactatccaagtacctttatcaccctttttaaattcttgatctcgaaagccttctttatcgtaaaaatcatcgagatttttggttggatataattttaatgtttgattaaatgtgtctttaatttgggcgtttcgaccatttgtttttgtcataatgacataacctacaatcaatataatgagtaataccaagcatataccgagcgttaatttctttgaatgaatcatcatttctccaccttatatttttaatattgactcagtttttaatatttacaactaaagcgaaaaattattttgaacactttatgaaatttttatttcaaacttctattaaccctattcagtaggtttgaaattaatactatcagaaaaatacacattttcttctttatttcttataaagttaaattctagttctttagaacctacggatgagccttttaatcgccatcaccttcatacagtttgaagtcatatttaccaattgtaaatgacgactagatgatatatagttcaagaaacatcaaaattcgttaaaacataatcaaattttattatgttcaaaactttattttccaaaaaataaaaaaaagttaaacaaagattggttgcttaacttccattattgaattcattagtccgatttgacatagatcccgaaaaataatggctaatagccacttatagtcgaaattatgaactatataattcatttattattaaatggattatatacttattgtgtttcttaatacctttttatactttaatatcttgaattttttctaaatcattactaatatcttttaattcgtctgtggcatttttcacccaagccccttgtgccgcatttttaaaatcatcttcaaattttttgaaatgacttaccatttggtcaagtaatattttctcatcacttttcagcttattttgatgatcatgatgcatacgaacatgttcaggcgcaataacctcactaatctgttctttttccttcatttgttccaatactgctaaatctggtaaaccactaaaatcaagtcccacgcttattcatctccttcaattctgtcagattgttttagatattctcttcttaactcatctttataatcttctaatttcatttcgtgatgtcggatacgttgattcgtttctctatcgaaagattctataatacgtgtcatcctgatcatagcgtcttcactataattcattttatgtttgagatataagaaatgatcatacatttgttcacatttcttgcgtgtttgatgtcttaattcatcaatttgattgaatgcatcattcaattgttttctttcttcatcataggcattttcaagttcattaatatttttatacgtagtaaacattacatcatcccatcaatctggctcgctaacatttggtcattagaaacaattgcttcgatactctgtttaatttttgcgatatagccattacaatttttataaacatcatttaatttctttatcttatcatcaatttttcttttgggatctgtttcaagtttactttcatacgcgccaccttttcttaattcatctataacctcttcagaggttaatttttcaccaatttcatttccaacttcttgcgcttttttccagttgtctccaaatttatgtgccatcgcgtgatacattttttcaaatgttggctttcttcattcactaattgatttaagccttcggcaatggttagtgctgttaaagcttctaataattgttgttgggaggaagagagtgatccacccgttgtttgaatccaattcgctcttaacgtctctactttatgtaatctatgcctcgtttgtttacgaacggattttaatgctttattattttcgtcttggtagcctttaactttgtttaattcagctaagattatagcctgtgttctgctcattaaaataccactcattgcatggccttctccatttttaagtactattttttctccagcagtttcatataaatgattgcggacacctgcatctaattcgtcttcatcagacacaaatcttacaatgtgaccatcgtacttttcaatcaattttttaagttcttcttgatcggcataaaggccgctcacatctttgatcgctaatggagctggattatacacaacgatatgtttaatatcattactcatacctaaaatcatcgcatctctaccgcccagcgaatgtccggtaataatatcaatatcatagtcttttttgatatttttgataaagtcttgggtatttttataatgtggatctttatctgtgacggaatgaaggccaatattgacatcggccccaatatcttttagcgtttcactcacgtctatatatccttgataagaaggaacaccaaatgtttgttttaatattgcgtctttgtgtacattagtacctgtcatacctaaagtaactttgccagtgtctttatttaaaaaggcgcttgtagtcgtgcctgttttggggtccgtataacttttaagatatgaaagatttttagggaatttatttttttcttgtaactttttaatttgtttatcaattttattttgttttaaaccactgttatttgcgttttctatttcataacttatattagatactgtacttgtttcttcagagttaccttttatattgccagattttatttgatattccgtttgactcatgatttatcatcctcgctaggtgtaaattcgaccgaatctgaaaaatagatattctcttcttgattttctacaaacgtaaattctagatccttagatcctacggatgagccttttaaattgccggatcctttcaattttaattcgggcgcttgtttggttggaatatgatatcgttttcttaactgttgaacattatagtcatcattattcaattgatactttgcagaataacttggcacattaggattatatgaaatatcaccatttttataatctttaaaatctttaaaatttccatattgtacaaagaacttaaagttttcaatctctttttttaacttgtcatccggtataggctttgttggaataattcgattattttccatcttgacaggatattttttttctttactacgtgaatatcctttactatcttcagttatttcggtgacaataaaattacccttcgttgttctagtattgcgattgatatagagcaccattcctctcgattccatatttttcccttttggttcgataaccatttcagaataaataatccaagtccctttatctcttttatcaaattcttgatctcgaaaaccttccttatcgtaaaaatcatcgagattcttggttagatatacacttaatgttttgttgaaattttctttaatttgagcgtttcgaccatttgtttttgtcataatgacacaacctccaatcaatataatgagtaataccaaacatataccgagcgttaatttctttgaatgaatcatcatttctccaccttatatttttaatactgactcaatctttaatttacacaactaaagcgaaaaattattttgaacactttatgaaattttcatttcaaacttctattaaccctattcagtaggtttgaaattaatactatccgtaaaatagatgttttcttctttattttctataaatgtaaactctaaatttttgtgtcctatagatgatccttttaaatcaccatcgccttttattaataatttaggtgctttcttagttggtatatcatacctctttctaagttgcttcacattgtagtcatcattacttaattgatactttgctgaataacttggcacattcggattatatgaaatgtcaccatctttataatcattaatatctttaaagtcaccgtattgtacaaagaatttaaagttttcgatttcttttcttaatttatcatcagctatcggtttggttgggataattttattatgttccatttttactggatattctttttctttactacgtgagtatccttttttatcttcccataattccctcacaataaattcaccttttgtcgttctggtattgcggtctacatacaggaccaatcctctggattccatattctttccatttgtttctattgtcattttagagtgaattatccaagtgcctttgtcgcccttttcaaactcttgatctcgaaagccttccttatcataaaagtcttcaagatttttagttggatacaggctcaacgttttgttgaagttttctttaatttgtttatctttactgctttcttcctttttcattccgcaagcccctataaaaacagctaataatactaaatacagccagagcctcaacctttttgagtgaatcatcatttcacatccccatttttatttttgatgcaaagttaagttcaaattccaatattaataatattagaggaaattttatgattaaatcctcgtggattttaattgttagttgtatttttcacatatcaacatcacaaattatttaaaaagcgcaaatatctttataatttttattggcctaaccaactaattaattaagataaattgcgcttatatttaaaataataacactgaaactcaatgtatttacttattaaaattgatgtttaaatacaactttactaacattcatttttcggtttacattaatttgttagataacgatatatatcatctcttacagctttatccagtgctaaatccatcgttactacgtttgaaccattcggcattttatcttgcttttctgaaccttctatatatccagcagttcctaaataataaaaatatataccatcatcatcttttttctgtacaaaaatatacattttaattccttttgctctatgggacaaaattttctgaacttcttttgattctagcgttctattagatttagtaaaccattttaattcatcttgacttaaaaattcatcttcatattttgtgctatcacttatatcctcatgcttatcataagtgataaatattggcatttcttggctttttatcatgtatcccatgattacagacgaaccatttttattccaattaaatattttactaaaatcttctcttgaatatttattatataaaatcagtccatttttacctttttggtatttttcattgttatactttgataattcaataagatcttctaaaaacatattaaatgtttgattacttagagcattagtaaatgcatcgcttagtcttatcattctttcattacgttctataatgggacttccatagattttttcaattcctgcgttgtaaaatgaaaaatctaaaattcttaatgaagtatctatatcatcttctgttatatccttaacttcgttcaacattttattttttaattcatcatatgttaattcattttttaaaagttcttctaaaactaaactatcgattcttttcaatccaggtgctatttgccttgaaaagaaaaccagatttttagattcattttccgtcaataatgtatctatttttttatatctcactaagaactcgtaataattactaaatttagaaaatataacgcttggatctatagaatgttgttgtatgaaatccattagtaacggcatgtgtcccaatctattttcaacttcttcataagcttttaatattaatttattttgatttaatgatactgcatccaatgaattgtaaatctgttttttagcaacttcttcaaaattaattgtagatactccattaatcgaatcgttattcgttaaaaacttcttataattatctttattttgcgattgatccccagaaagcgcaatcggaattaaataatttgtcttataattaccaataaaatcaattactgtaacatactctttatttgaactttttcttaatcctctaccaagttgctgaatgaatataatactagactctgttggtctcaacattacaacttgattgacttctggaatatcaataccttcgttaaaaagatctacagttataatatagttaatcttaccttcttttaatttttctattacaatttggcgataattaacactatcatctcctgttaaagcaacacttttaatcccttttgaacttagtttatccgctaaatcataagcttcttttttgctacttacaaaaatcaatccttgtaaaatttcacctgaatatccatagtaatctgtcttttaaataatataattaactctttcatcagaagttaaatatctcagtttagttacatcatcttctttaataccttgatgtacataatcagtcacaccaaaataatgaaatggacataaaatatcactttctaatgctgcttgtaaccttatttcatatgcaatattataatcaaacagttcaaatatacttaattcatctgatctttctggtgtagcagtcattcccagcatgaacttaggtttgaagtagttaaatactcgttgataagtagatgcagcagaacgatgtgcttcatcaaaaacaatataatcaaattcattttcatcaaattgcttaaaattatcatctctagataatgtttgaatggttgcaaataaatatttggcatcgacatctctatgttttcctgtcaacaatccaaaatcactatcattttttataggtaatacttttttaaattcttccttagctctatttaaaatcccctcattatgaacaataaataaaaatttattagggtttacttctctaacatctaatgcacataaaatcgttttacctgtaccagttgcagatattattaacgccttatctttggctttatccctaatagcttttaatgaccttaatgcttctgcttgcattaaattgggtacaatttccactgattttttcaccttatcagctagcagcatttgagtttgttcaacctccgctaatttttctaaggaacggtactcaaatgattctttatatgaattaatccattgctcagtcagtggggtactcttttgccataacaagtcaaattcactttttacactatcaactaaatcgccatttttcatagtagacagtaaaacattatgctcataattaacctttaacgcattagatgttaaattagagcttcctattaccatagaactataatccttatgctcaaaaatatatcctttggcatggaatccagcaatatcagttaatcttacctctacattttttaatttaagtaattctccatacattttaggactattaaaccctaagtaattagatgttaatattttccctttaacacccttattgcttaaatctaatagttgagcctttaagctggctaaaccgctttctgttataaaagccacagaaaaataaaacgtttcacatttttgaagttcatctataattgttgaaagaactttttcatttttattatttactaaaagcttcggtgtataattccctttatgagaaatatgtttgtctataaaccctttatgtaaagattgattgaaatcatttagtaatctactcatattatccctcagtcataattttattaacggctggtatatccgctggggcccaatttaatttatcaagttcgtttattgacaaccattcaatactcttatgttcagttagagttggtaactctttgtttaaagtacatttgtatgttgttaacctaacaattccaaaatcatattcatgttctgtagttataactttgtctccaacaattaaatcacatttcatttcttctctaatttctctaatcaaagcgtctttttcagtttcattcttttcaaccttaccgccaggaaattcccacattaaaggcagactcattttttcacttctctgtgcacaaagaattttgttatcagaaaaaataatagctcctactacattgattacttttttcataagactcacccttcaatttaaaatcatcttaattgttattctatcaaaaattacaaaactatatataaatcaatattaaaaattaatattttacattcacatgaacgctctactccatgcattttcatacacatctattatataatacttgtgaaaagtattgtcttggggctgtgtttttttacttttggggcgtatttctttataattcattacataaatgtaagggctttagttttcatgttttattaagtctaactgagattttgaaaggatgtttagcaacaatggataaagaattatggatagaacgagctaatgatagtttagttaaacatttttatgagcagcaatctgacattgaacagcgagaaggttttgaaagtaaattaacatttggtactgcgggtatacgcggaaaattcggtcttggtgaaggtcgacttaataagtttactattgaaaaattggcattaggtttagcgcgttatttaaatgcccaaacaaacagtccaacaatagtcattcattatgatattagacatctttcaactgaattcgcccaaataattgctaatgtattagcaaaccatcaaataacagtttatttacctgatacatataaaacgacaccggaattatcgttcgcggtgcgcaatcttaatactactgctggcattatgattacagcaagtcataatccgaaagactataacggcatcaaagtatatggttctgatggtgcgcaattatcgactgatgcatctgagcttgcaagtcgttatatcgaagaagttggcgatccattacagattgatatacctatttctaaacaaaatacatcttatatcaagccttttccgaaatctgtaactgatgactatatgaaacacattcaaaatatgattggctatattcctaaatctgatttacaagttgtgttcactagtttgcatggtacaagtgttccgattgtacctgagttattacaatctttgaatttcaatcaatttaatcttgtagaagcacaatgtaaacctgatccgaatttcagctcagttcaaagtgctaatcctgaagatcatcgcgcttttgatcaagcagtcgaacttgcaaataaaagtcatgcagacttattaatatcaactgaccctgatgcagatcgacttggtattgctgaacgtgatgcacacggtcatatcacatattttaatggcaaccaaattggtgcgctgttacttaattatcgtattcaacaaacgtctcaattacgtcaccgcttaatgattcaatctattgtaagtagtgagttaacaaagtcattagcacgctataataatgttgaatacaaagaggtgctgacgggctttaaatttattgctcaggaaataagacaactggatgatcatcaaaatatgattttcgcatttgaagagagttacggttttctatcagagccttttgtacgtgataaagatgccgtacaaattgtgccactcattataaaatacgcttctgagttaaaattatatggcaaaacattgaaagatgaattagaacagatttatcaaactgttggtagacatgaggatacattattctcgcatacgctagaaggatttgaagggaaaaagaaaattaatgcaataatgaccaaattccgttcaaatccaccgcaagagattcaaggactcaaagtgaaagcaattgaagattatttaactagcgaggtttatcatttggataaagatacaacgtcgcagattaattctcctaaatcaaatgttattcgtgtcttatttgacgaaggatttatcgctttacgtccttctggtactgaacctaaaattaaattatatgtgtcgttaaaatgtccgaattttgatgatgtagctcaaaaaattaatgcgatgatttttagctaattaaaaattttatacatcgaaatattacatttcattttatgcttatcagcccttttgaaactagaatccttatgttttcgcgttttgaaggggctaatttgtaataatttttcaaaagtatattagaaaattaattttcatgtatttttcatattaagcggtaataatataataattaataccgcgacctatttaattgttttcgcgatgaaaaaggtttagaattacaaaaataactattttaaatttagttacaaatatattttagaaaggatgtgaaataatgaaaggctctaaacaaatacttttgattatgggcattatatctcttattgttttatttatttttacactattcatcatggcgcaatatgcaaaacattatgaacaaaaatccgacagttccaacgcacatactttaaattcatcatcagccataattgagcaacatactatgtcgaatttagcgtctctagatttatacgctcctgttcgtaacattacttctagtcgtgatattcatcccatttatttcatgacaaaagattaaaacttcctttttcataaccccattcattcaactaataaattaaaaaatgataaaaacgtactgttttttagaaacatacatatataagaaacgcatccattactaaaagacagtacattatattctatcaggaaggtgcaacaatgaccgtcaacatcgtatttagtatcgtattctgcataagtatggttatattaggcatttatgtcgcaataactaaagatttcacactaatctcttttataaatcaaacggccattgcagataaacacaagaaccaaattgcatatatatttacgctatgtataagtttgagtgcagtatttttaatgtcttcaattctaagctttgaatatgattttattgcattagcattcttatttttaacgatagcattattacttatcgcattattctacgtttgcttttataaaattacaaaatacccataaatgtttgtgatagtgtgttggttagatttattgatgcgctgtcagtaagtaattgtttgcgaaaaaaatacaaccttgtacgaatacaaagttgcattaatatagaatcatttatgctttttaatatcacaaaacaaattgattaaactagctaaaatagtcaaaattggaatcaagattacataaatatcataacctctagatattagtatacataatataattagcgaccctattataattgctaaattataagccaaactaattttatatttcatttcaattcccaccttaatagcatttattaaaattctataatgtttacatagacttcttaacaaactttaacccagctaagctaagtattgaaataattacacctcctaatataaatatattacttaagcttagtaaaggtataattatacttatcagtcctaaagacaatgtatccgctgcataattcgatgtagatgagatactaaatactttccccatcaaatgatttggcgtttttatttgaatggcaactgatcttgttagtccctctatagattgtccaagtcccaataatgttgcacctatatataatatcgccacacttggaaacacattaataatcgataagccaattccccaaactaaaacaccaatactaaatttaaagattaatcgcttttctgacagcaaacccataatcaatgacattaataaagatgctatacctaaacatgatgtagctagtccatatacaccaacgccctcttttaatatattggaaataaacaatggtaatacaacacgccaaaggccagtattaatcaatatgcaggcaaattggatgattataataaatggaatttctttagattgtttcaagaattcccaagtttcagaaaaatcttcttttgagtgtctatcaatcatgttgttatttgtatattttaaaagtgcattaaaaataaatcctaaaaatagcaatatactacaaataaaaaagacgccaacattaccaactagtattacaatgacaccaattaaagcaggtaaaataatatttgagcctctttgcaaactatcgattaacgcattacttgttgctaaatgctcctcatcaataatttcaggaagaattgccctaaacgcaggatccgtatagcagttaataatggtgatagctgtagatatggttagaagcgtcagataatttaaatttgatgttattgcaagtaaaggaataattattataatcaaacttagtataagatcagatagataaagtattttctttttattatgtttatcagaatatgcgccaccgaaaataccaaatataataaatggaagtgtttgactcataaccatcattgataattttaaagatgattggcttgtcaattcaacagtaaaccaaattatttgtaacgaaaacagcacaaaacaactccgacgtaagaaattaccaatcaataaatatgtaaagtttctatttttcaaaacttctaaatacaacatatttatcacctctcataaaaataattgaatgcatccaccagcttttttagaccttcttctaaactctctttatccaaagcgcaattaattctaatataatttagtcagttaaatatcaattatttcgaaatatacatactacttgaaacaccatacataacccccaaaatgactactcagaggttatattctactaattatgattatattaaatatgaaaatattatcaaaaaaatcaaatttataacaaaaatacaccccttaaagttaggtctttcaatccaacttttggggtgtatatcattctcatcatattctaggttgtttttaacaaactaaatatagtgaatgcaaatcaactattatttaaattatgaattattttaattctttcttctacgagccaataacattaatccagcaattccaattatactactaaagatcaaacctttttgcgtgctttctaaacctgtttttggtaattctgctcgttttttctcttgattagctactgattctttagcaattttagattttttaactttatcatttttatccattgaatgaactgggccatttggttttgctctgtctttcgataatcctggattgttaggatttactgggccacttggatgagttggtctgctcggcttctctgggttttcaggtccttttggatcttttggtttctctccaccgaactctacaatcttatctactgattgttttgtgatctcttctgttggttgaccctcgccaactttttcacctgttaatgggttcactgtgattggtgttgtgattgtcttacttcctggttgtccttcttgtttcactcgctcttcaccaggttgtaattttggattaaactcacgttttgtttcaaacggtatctctactgtttttgtttctggtgtacccgtttttggtccgtgtttaatcacatcatccactggctcttcgatcacttttcctgtgtctggattcttgattcctggtttacctggtactttttccgtttgatctgttggtaagtttggatcaaagatatctttatgaccttgcggtattttctcgccaccgaattctgttaattcattaactggatcttttgtgatttcttctttcgattcacctttactaataatttctccagttaatggattttttagtgttggcgtcgttattgtcttctcacctttttgtccttctcttgttactttttctgtccctggtgctaaatcaggattaaatttacgttctttctcgaatggaatttcttctttttctacaatcgagtctccttttacaggtccatattttgttacgctatcgaccggtggtctaactacatctcctgtttctggattcttaattcctggtttacctggaacttcctctttctctcctgttggtaacttcggatcaaattcgtctcgatgacctggtgttatcgtttctggtccgtattctgttaattcattaatcggatcttttgtgatttcttctttcgattcacctttactaataatttctccagttaatggattttttagtgttggcgtcgttattgtcttctcacctttttgtccttctcttgttactttttctgtccctggtgctaaatcaggattaaatttacgttctttctcgaatggaatttcttctttttctacaatcgagtctccttttacaggtccatattttgttacgctatcgaccggtggtctaactacatctcctgtttctggattcttaattcctggtttacctggaacttcctctttctctcctgttggtaacttcggatcaaattcgtctcgatgacctggtgttatcgtttctggtccgtattctgttaattcattaatcggatcttttgtgatttcttctttcgattcacctttactaataatttctccagttaatggattttttagtgttggcgtcgttattgtcttctcacctttttgtccttctcttgttactttttctgtccctggtgctaaatcaggattaaatttacgttctttcttgaatggaatttcttctttttctacaatcgagtctccttttacaggtccatattttgttacgctatcgaccggtggtctaactacgtctcctgtttctggattcttaattcctggtttacctggaacttcctctttctctcctgttggtaacttcggatcaaattcgtctcgatgacctggtgttatcgtttctggtccgtattctgttaattcattaatcggatcttttgtgatttcttctttcgattcacctttactaataatttctccagttaatggattttttagtgttggcgtcgttattgtcttctcacctttttgtccttctcttgttactttttctgtccctggtgctaaatcaggattaaatttacgttctttctcgaatggaatctcttctttttctacaatcgagtctccttttacaggtccatattttgttacgctatcgaccggtggtctaactacatctcctgtttctggattcttaattcctggtttacctggaacttcctctttctctcctgttggtaacttcggatcaaattcgtctcgatgacctggtgttatcgtttctggtccgtattctgttaattcattaatcggatcttttgtgatttcttctttcgattcacctttactaataatttctccagttaatggattttttagtgttggcgtcgttattgtcttctcacctttttgtccttctcttgttactttttctgtccctggtgctaaatccggattaaatttacgttctttcttgaatggaatctcttctttttctacaatcgagtctccttttacaggtccatattttgttacgctatcgaccggtggtctaactacgtctcctgtttctggattcttaattcctggtttacctggaacttcttctttctctcctgttggtaacttcggatcaaattcgtctcgatgacctggtgttatcgtttctggtccgtattctgttaattcattaatcggatcttttgtgatttcttcttttggttcacctttactaataattactccagttaatggattttttagtgttggtgtcgttattgtcttctcacctttttgtccttctcttgttactttttctgtccctggtgctaaatcaggattaaatttacgttctttctcgaatggaatctcttctttttctacaatcgagtctccttttacaggtccatattttgttacgctatcgaccggtggtctaactacatctcctgtttctggattcttaattcctggtttacctggaacttcctctttctctcctgttggtaacttcggatcaaattcgtctcgatgacctggtgttatcgtttctggtccgtattctgttaattcattaatcggatcttttgtgatttcttctttcgattcacctttactaataatttctccagttaatggattttttagtgttggcgtcgttattgtcttctcacctttttgtccttctcttgttactttttctgtccctggtgctaaatcaggattaaatttacgttctttctcgaatggaatctcttctttttctacaatcgagtctccttttacaggtccatattttgttacgctatcgaccggcggtctaactacgtctcctgtttctggattcttaattcctggtttacctggaacttcctctttctctcctgttggtaacttcggatcaaattcgtctcgatgacctggcgctattgtttcaggtccgtattctgttaattcattaatcggatcttttgtaatctcttcttttggttcacctttactaataattactccagttaatggattttttagtgttggtgtcgttattgtcttctcacctttttgtccttctcttgttactttttctgtccctggtgctaaatccggattaaatttacgttctttcttgaatggaatctcttcaacttttttttctaattctgttattgtttttggcgcttctggtgtaaaagtaaactctgaacctttcaagtcagttctcatccagccatttgcatttatcccttgattaaggccccatctttgactagatgtaattaagaaattatatgcctgatttttagataaacctaaatctgttattgaagtctcccaagttttaccagcatattctgctctcattttaccagttgaagcaacataagttaagatgacatcatttaaacgttgcccatgaaactttccatctgatgtattagttgaattgtccgcatagtttaaaaaattagtttttgatttatcaatattttctccaaccatttgtgaattaccagaactgtcatttttcacaaaagctccgtatcctctataaccttgtccagcttgcttttcagttttgtccatggaacttgtataaatgtatccagtatcaattttaaatccgcctgaatttaccagacctttatccccaaggattccaccattagttaaatattcttctgcatttcctttactaaataagaacccccaaccatcagcacctgtggtatttgattgatggttatttgccactctaactttaaaattgaaatccttactaaaatctattttattttttaattgtaaagctcctatcaaaccattactttcattaccaacattaaacctggttacctctgatacccctaaatctgttggttttttttgtatatcaacacttccgtaaccttcaaaatgttctttaccttgaattgtaattggggtagattcaactacatttttagaatctcttgtaatatcaaaagagccttcatcaacagaacgagcttttctaaccttaggtgtctctgcgttatgagtgactgacgatttcggctgaacttcagcaacatcagctacttcttttggtgtatcctccttttttgatatatcttcagcttttactgatggttcatgttcgattgtgtctttgtttgaagttacttcagatttagcttctacaccctgtggtgcagtgtctttgtttgttacttcttcaatcttcacttcttttgattggacattatcttttaatgtagttggattctcaatattgttttcagctgcttctgcctcttgttgagttcccaaatacattagtgagccaattaaaatagatgctgttccaactgtaaattttcttattgaatatttattcaatttatttgatagaaaatctactcttttatttaccggtcctttcttatctctcatttgcatactcctttttccatattttccactttacttacagtgaatttacatgtaattttacaaatacaataggagttgcacaatggaatataacacttatctttataaaattattttatatattgacgcacttaaaacaatctacaaataaaattattatttttagttttcaatgaataattcattcttatctgttggaaaaacccatcaactcaatagcattgaatttctaaaataaaaaataccttaacgcatttaaaaatacatttaactgcaccaagatattaaaatctcgaaacatactttatgtttcattaatatttatttcactcaaaagatttttaatataattgtgttgttttacagaaacaacaatgattacatttctactatcatgtgggtctctacatttattcaagtaacccttttttgataaatcttttacgcttttaacaattctagattggtctataccgatataacttataatgtctctcataaaatatttaccttcatcatttttaaatacatctaaatatgctaatactaaataattatctaatgtaagacaaaaatatttttttaaatatttacgcagctcatatgtagttaatactcttttcattaatttaatattgctcttgcttttcaaatcattcatcaagtcttcatcccttacttttaattgtcacgtcaaataatatttgtctttaactagtaataactccaaatatatttagtttgtggtgctagctataaacacaaatgaatcataacactatattttgattttgttcaattgtttttatttttggataataaatgaatttgtcatttgttattctgtgatttttaattatttatattttatatatatattatatataaaaatatttaggttaacatgtcttcaaaagagattgcttttatattactttaaataatataaagtattgggacatcagaaaatagtaggagaatgtaaggtggactatcaaactttcgaaaaggtcaataaattcataaatgtagaagcgtacatattttttctcactcaagagttaaagcaacaatataaattatcattaaaagaattgttgatattagcatatttttattacaaaaatgaacacagtatttcactaaaagaaatcattggtgacatactttacaaacaatctgatgttgtaaagaacattaagtcactatctaaaaaaggatttataaataagtctagaaacgaagcagatgaacgccgtatttttgtttcagttactccaatacaacgtaaaaagattgcttgtgttattaatgagttagataaaataattaaaggatttaataaggaaagagactacataaaatatcaatgggctccaaaatatagcaaagaattttttatactttttatgaacattatgtactcaaaagattttttaaaatatcgatttaatttaacatttcttgatttatctatcttatatgtaatatcatctcgaaaaaatgagatactaaatttaaaagatttgtttgaaagtattagatttatgtatcctcaaattgttaggtcagttaatagattaaataataaaggtatgctaatcaaagaacgatcccttgcagatgaaaggattgtgttaatcaaaataaataaaatacaatataacactattaaaagcatattcacagatacttccaagattctcaaaccaagaaaatttttcttttaaatttaaacagatttacctcttgataaaataaataagcaatcatactacttctcaatttagtataaataaaaatacataattaactttcttttgtttttatattatttcaataccctactatatatcacaacacataaattaagcatgacactcattcaatttagttcaccatttcgtgttccaattttactgagtatcatgcttttaatgttataaacctaatgctttaataaatcgtgttaattcttctcgcatactgtcatctttcaatgcatattctatggtagttttaacgaagcctaatttttctccaacgtcataacgttcgccttcgaagtcatatgcatacacttggttatcattattcatacgttcaatcgcatctgttaactgaatttcgttacctgcgccttctttttgcgtttttaaataatcgaaaatttcaggcgttaatacataacgtcccataatagctaggtttgatggtgccgtaccttgtgctggcttttcaacaaactttttcacttcatactgacgtccgtttttagttaatgggtcaataattccataacgatgagtatctgcttccggaacttcttggacacctataactgagtgccctgtttcttcataaacgtcaatcaactgtttcactgctggcacttcagattcaacaatatcgtcacctaataataccgcaaatggttcattgccgataaattgacgcgcagaactaatcgcatgccctaaacctttttgttctttctgccttacataaaaaatattcgcaagttccgttgaatactgaactttctctagtaattcagatttacctttttcttttaacaccatttctaattctttttgactatcaaaatgatcttcaatcgcgcgtttgtggcgacctgtcactataataatatcttcaattccagctcttgcagcttcttcaacgatatattgtattgtgggtttatctaagataggaagcatttcctttggcatcgctttagttgctggtaaaaatctagtccctaaaccagcagcgggaatgattgccttttttatttttttcaaagttaatgtgctccttttcctaagtattaaatctatgtatcaacgtcattttaacactaattagaacgccttcatagtgtcattgagtatgtaattatttcttgggaaatttgttttaattttaaaaaacaggcttacttcatataatttatgaaataaacctgtcaattttggattgattatgctttgtgattctttttatttctgcgtaataacgctaaacctaaaatgctaaataatccgccgaacaacatgccgttgtttgttgattcttctccacctgtttcaggtagttcagatttcttagattgtgcttttttagttggtaccactgctttaaccttttcattgatttcaataacaggtgttactactttaccttgttccactggtttagaaggttttttaggttcttctttagcaggtggtattggtttaccaggttcagttggtacctctggcgttggcggtgttggtgtttccggctcgcttggtacttctggtgtcggtggtgttggtgtttccggctcgcttggtacttctggtgtcggtggcgttggtggcacgattggaggtgttgtatcttcttcaatcgtttgttgaccttcattatgaccacttacttgtggaagtgtatcttcttcaaagtcaacactattgtgtccaccgaattgataatttggtttatctttatttgtatcttcttcaataatttcagtgtgcttattgaatccgtgaatatgtggcacactgtcgaagtcgatatcaatgatattaccaccttgttcatacttaggtttgtctttctctgtatcttcttcgaatgattggttaccattattttgaccatgaatttgaggtacactatcgaaatcgatatctacgatattgccaccttgttcatatttcggtttatcttcttctgtgtcttcctcaaatgactgattaccgctattttggccaccttcgtaacctaattcactcttaatatccacgtggctattttcttcgatttcttcaatcacgccataattaccgtgaccattttcagttcctaaaccagaatgagaaatatgatgattgttttcagtaatttcctcgattggtccttgcgcttgaccatgttcttcaggtagttcatctactagttcaatcagattactttcagtcgtatattctttcgtatcttcaattgttgtatgatcgctaacagcaccagttacaataccttttgtagaatcttcgtcaaattcaactaggttagactcagtagtaacctgaccaccacctgggtttgtatcttcttcatattcaacaacatcagcatgatgttttgaattttcatgtgtcgattcttcaaagtctacatgaatagaatcttcttcagtttcaatggtaccttctgcatgaccttctgcaccttcaacagctgtatgatattcaaaatcaattggcttagaatcattactttcttcgattgtaccagtcaattcatgcttctccactggcggctctgatttaaattcaagttcgataggagtactatgttctataataggttcctttagtttatctttgccgtcgccttgagcgttattagagtaaaatgcaacgccatttttccaagttaaattacttgtataataatagttataatatccaaaaaggtgtgtttgaaattctaagttgctagcatttgaatcataatacccttcatattttattacataatttttactttggtctaaattattaaagtttaaagaataaccaccattagtatcaaaatctaaactcatattatcagtcacatcttcaaatttgctgacatcatcaagctttgcatatacgctttcagctaaatcgtctgaaccaatgtgtttatataccttaactgttggattattaacccctggtttatttcctttagttacttgaccagttactgtcacagagcttaacgactggttgttaggtttcatgtacgcaaaatgactaaatttcccatctactttatttaaagtatcaattcgaccattagctgttactccccaattatctctaactccacctaaatattgaatattaaatattttgctaaccgtagtctcacccaatttaacttcaacattttggttacctttttgcgtcactgttgtaggatcaataaatagatttaaagataattcagcagttaaatctttcttttcttgtacatattctttaaacgtatatctaacttttctttctccaattatttctcctgtcgccataacttgaccatctgtactttttatctccggaactttacgcagtgttgagataccatgagtttcaacattatcgcttaatgtgaaatcaaaataatctcccgccttaattccttctccaaatttccatttatatttcaaggttactctttctgcgttatgaggatttacaacattcgtatcttgtttatgtcctacaatttcactaccttcttctacttccactttatttgttacatctgtacctgtcgctttagtttcttccactacttctttctctgcaactgctgtaacgtcagttgatcttttcattcttggtttaatttctgagacgttacttggttgagctatgtcaacttgagttcctgtagtttccttatcagcaactttttccgatggcaaatcaactcgcgaagtttctacttttggtgcttgcacagttttcggtgcttcttctgttgttacttgtgttgattgtgatggttgctcagttgatgtcgcgctgtatgattgtgtttcatctattgtattaacgttatttgtagttgtttgtgtttcgcttgctttactttcagtagctgaactcccactttcctctactgtagtattgttttgttccgatgctgcagcttctttttcttgtcccattccaacaacgatcattgttcctaagaatactgaggccgctcccaatttgtgttttcttatgccgtatctaagattgcttttcactataatattctcccttaaatgcaaaattcatttatttttaaaactcaataaatgcaattctatattgttcggtttttaaaagcaatgaaaaaaagcgagttaataaaaagttaagattgttgttaactttatgtataatgagttttttattatttgaaactcacatatatattgcatacaaagctcttgaacaccttgatataacaggcttgtattttttatacttactttttaaattaaattcaaattcatctaatttaaaacaatatactaaaccatacataataatcgcctgtacaatgcatcattaacaagtcactgaaacgcctttcattgtattaataacgtcactataatttttatatcgttcggtttttgtttgattttaatgattatttatacaaaaacagccgtatttcaagccgacattttaaatttaactaaatttgcatctagttaataattgcatttatcaaatttgtcttattgatccaatctaatttgtactcacaaactagtttaaaattctaactttatctctcagttcgttatcaatcatcagacataaaccaatgaagcaatcagaaaacactctaattttctattagaaatttgatttaatataaaaaaacaggcttacttcatataatttatgaaataaacccgtcaatttttgtttaattatgctttgtgattctttttatttctgcgtaataatgctaaacctagaatgctgaataatccgccgaacaacatacctttgtttgttgattcttctccacctgtttcaggtagttcagatttcttagattgtggttttttagttggtgccactgctttaaccttttcattgatttcaataacaggtgttactactttaccttgttccactggtttagaaggctttttaggttcttctttggcaggtggtactggtttaccaggttcagctggtacctctggtgttggcggtgttggagtttctggctcactcggcacttctggtgtcggtggtgttggtgtttccggctcacttggtacttctggtgttggtggcgttggtgtttccggctcacttggtacttctggtgtcggtggcgttggtggcacgattggaggtgttgtatcttcttcaatcgtttgttgaccttcattttggccgcttacttttggaagtgtatcttcttcaaagtcaacactattgtgtccaccgaattgataacttggtttatctttatttgtatcttcttcaataatttcagtgtgcttattgaatccgtgaatatgtggcacactgtcgaagtcgatatcaatgatgttaccgccatgttcatacttaggtttgtctttttctgtatcttcctcgaatgactgattacctttattttgaccatgaatttgaggtacactatcaaaatcgatatctacgatattgccaccttgttcatatttaggtttgtcttcttctgtgtcttcctcgaatgactggttaccgctattttggccaccttcataacctaattcactcttaatatcaacgtggctattttcttcgatttcttcaatcacgtcataattcccgtgaccattttcagttcctaaaccagaatgagaaatatgatgattgtttttagtaatttcctcgactggtccttgtgcttgaccatgctcttcaggtaattcatccactaattcaatcagattactttcagttgtatattctttcgtatcttcaactgttgtatgatcgctcactgcgccagttacaataccttttgtagactcttcgtcaaattcaactaagttagactcagtagtaacctgaccaccacctgggtttgtatcttcttcatattcaacaacatcagcgtgatgttttgaattttcatgtgtagattcttcaaagtcaattggatttgattcctcagaggactcagtgtatcctccaacgtgacctgcttcgctatccacagcagtatggtaatcgatatcaatagctgatgaatccgtttcttctattgtttcaatgtatccatcaacatatccacctccaccatctatagctgtgtggtaatcaatgtcaagagttgatgaatcatattcctcttcaacagtagttactaaattcttatcatattgacctgtaagagtttctttaattgtatcttctttatattcaaatttattattttgaataatcggaccatttttctcatttccgttcgctttattactgtataaaactaaaccattatcccaagttaaggtatatcctctatcataataatacttataaagttgctctggatgtcctaccatttgtgttctaaaatcaacttcatcagtaccatttaaatactctccatcatagtgaacaacataagttttatctagattttctatattcaatgaatagcttccattattttgtaaattcaaattcccactcatattacttgtgacttctttaaatttagaagtatctgtcgtatttgcatatacactcttcgctatgtcttcattattacccaagtattcaaatatcctaacttttggttgatttccattctgattactacctttcattaaagttccagtaacagtcacacttgtcgttttaccattattaggtttaataaatgcaacatgcgaaaatctattattcgctttattaaatgtctcaatcgatccatttaaattggcataataattcccaataccatctttatatttaacatctaattcctttgaagtttgttcttcatttagtgttgaagttatagtttgatttccattagtttgtacagttttaggatcaataaataaattaatttctagttcagccgttacatcaaccttatcttcaatatcatttgtaaatgtatatctaatctttccaccttctaaaacttcacctgtcgccattacgactgaaccatttttaatttctggtacttttctagcagttgatacgccatgcgtatttacattatttgataaagtaaagtcaaagtagtcaccttgatgtaaaccattctcaaatttcaacttatattttagtaccgctcgttgtcctgcatgaggttctactttatttgtattgttatgcccctcaatagaaccaatttctactgtaactttacttgttacatctgtacccgtttccactttcgcgttactagcttccttagcttccgctacatctgctgatcttgtcacacgtggcttactttctgatgccgttcttggctgtgccacttcaacttgtgtttctgcgacttgattttgtgtagcctttttaggtgttaaatctacttgtctttgatctccgctattgtcttgagattgtgttgtttccttaacttgaggtttcgcttcttccttaactacctcttctttaactgtttctatatttgctggttgtgcagtttgtggtgcttgtactgcttttggtgcttcttcagttgttacttgtgttgcgtttgacggttgttctgttactgttgcgttatatgattgagtttcttctatatgattaacgttagttgcagttgtttgtgtttcacttgttttattatcagtagctgaattcccattttcttctactgtagttgtcttttgttctgatgctgcagcttctttgtcttgtcccatcccaacaacgatcattgttcctaagaatactgatgctgctcccaatttatgttttctaatgccgtacctaagattgtttttcactataatatctccctttaaatgcaaaattcattaattttttaaacttaataaatgcaagtctatattgttcggtttttaaaagcaatacaaaaaagcgagttaatgaaaagttaagattgtcattaattttatgttaattgataattttattatttgaaatatacctataaattgtattcaagtcatcagaaacccttgtcacacaaggcttgtattttttatacttattttttaaattaaattcatcattatctaatttaaaacaatatactaaacgtttcataattatcgcctgtacaatacgcacaaaaacatgtcttgaaacgcctttcattactctaaaatacccaatatactttttatatcgttcggattctgagtatttcagacgattttctgcataaaaataaacgtgtttcaaggcaatatattgcaattacctaaaaacacgtttacttaatatttagttaaacaaataagctaatgaataaaatgaagatgatacctgaaacggaaataatcgtttctaataatgaccatgttaagaatgtttcttttacagttaaaccaaaatattctttaaacatccaaaatcctgcgtcatttacatgagacaaaatcacactacctgcacctatcgcaagtacaactaatgcaacatttacatctgatgattgtaataatggtaagacaatacctgtagttgaaatcgcagctactgtagccgaacctaatgcgatacgtagcacagctgcaacaatccatgctagtaaaatcggagacatctctgtaccttcaaacattttagcaattgtatttccgacaccgccgtcaattaatacttgtttaaatgtaccgccaccgccaataatcaataacatcattccgattggataaatcgcattcgtcactgattccataatatgattcatcttacgctttctcattaatcccatcgtaacgattgcaaataatactgctattagcatggctgtccctgctgttcctatcatataaatgatagattcaaatagatttgtaggtttgtcatgcccagttacaagttgcgttatcgtagacactaacattaatatgactggtaatgttgctgttaataaactcataccaaatcctggcatctcttgatccgtaaattctttttgtgcacctaacgctgaaatatcgccttctcgtgtatacgcagacggaatcattttttgtgcaactttgttaaatataggccctgcaatgagtgtaactggaatggcaataatcataccatacagtaatacatctccaacatttgcctttaattcttttgcgatgactaccggtcctggatgtggtggtaaaaagccatgtgtcactgataaagctgttaccataggtagtcctagttttaacactgaaacatttgcgcgttttgctactgtaaatactaatggaatcagtaagactaaacctacttcaaagaacaatgcaataccgacgataaatgctgcaacaagcattgcccattgtacatgtttttgaccaaatttttgaatcaacgtgtctgcgattcgagttgcaccaccaccatcagcaagcaatttcccaagtatggcacctaaaccgaatatcagtgcaatgtggccgagcgtactgcccattcctttctcaatcgtctccataattttagtcaatggtatacctagcattaacgctgtaatcatcgatgtgataattaatgaaataaatgtatttaatttaaacccaataattaatactaataaaataacgatacctaaaacaacactgattaacggccatatttcgttaaacatgacattcccctctttctcttttcaatagaatgtaacaccgtcgtcgcgcacgtattccacataatatatagtagtcatggcacaacaactttatctaagatgcttgagtgacgtatttattgtgttttattttcagcgatatgttggcgttgaaaatctgcaatttgttcataattctctgttaaagaacgacttaaattgataaaaatggatacgatctcttggtaaacagtgacattttcttcaatcggcgtatgattgtttgtggcaccgaccatcgatgaaacgattgaaaaatcttcaatgtcacctacagctttaagtccgagcacgcaggcacctaagcatgaactttcataactttcaggaaccactaactctgtgtcaaatatatctgacatcatttgacgccatacttcacttttcgcaaaaccacctgttgcttttatcatcttaggtgtttcattcattacttcaataagcgcaagatagacggtatacaaattgtaaagaacaccttctaatgcagcgcgaatcatatgttcttttttatgagataaagttaaaccgaagaatgaacctcttgcatttgcgttccaaagcggcgcacgttctcctgctaaatagggatggaatattaaaccatctgcacctggtttaacacgctttgcaatttgagttaagacatcataaggatcaacaccgagacgtttcgcagtttcgacttcactcgctagcaactcgtcgcgcaaccatctcaatacgacaccaccattatttacaggacctccgatgacgtagtggtcctctgttaagacataacaaaatattctacctttgtaatcagtacgcggtttatctatcacagtacgaatcgccccagatgtaccgattgtgacagcaacttctcctttaccaacactattgacacctaaattagaaaggaccccatcactcgcaccaataacaaacggtgtatctttattaagccccattaatgttgcataacgttctttcatacctttcatcacatacgttgttggaactaattccggcaacatttccttggaaatacccagcagttctaatgcctcaacatcccaatctaatgtttctaaattaaacatccctgttgcggaagccattgaataatcaatgatatatgtatcaaataaatgatagaaaatgtatgttttaatatctgcaaacttagcagtacgttgaaatacatcttgccattcatgtttcatccaaaaaatcttcgctaatggcgacataggatgaatcggtgtgcctgttcgctggtaaatcgcattgccatcatgcacttcatttattactgttgcatattttgcagcgcggttatctgcccaagtaatattatttgttaatctttgatgttgctgatccatcgcaatcaagctatgcatttgcgcactaaatgacacaaacttaatgtcgtctttattaactttggattctctcataacatatttaatagtcattagtactgcatcaaataattcatctgggttttcttctgagacatcaacgtttggtgtgtgtaaatcatagcctatttgatgtttcatgataaaagttccattttcatcatataagactgacttggtactcgtcgttccaatgtcgacaccaatcatatatttcatgataaatccttctttctttcattttaattcaaccaaaatccttcaatatctttaccaacatcgtcgaaatttaaatgaaacgcttctttcaaaatttgactgtcgtattgttccactgcatcaataaacacttgatgattatgatgtatgcgttcaaaatcttgcgggttctgttgcatacgttgtcgcatggatgttaaaacgagtgccatcattactggttttaaatgactccaaaatgagtttaaatattgatgattagatgctttgattaatgtttcatgaaattcaaagtcatgcttcgtaaatgattctgcatcctcaaattttactgccactttcatcatttcaagttgtttcttcatttcttttacgataggtagtcgctcttgatttttaactcttgaaaatgcaaatgactctaacatcagtcgcaaatcatacatttctttcttttcttgttccccaaacggcaacacatgtgcacccattctttctaattggatgagttgattttgttgcaataatttaaatgcatctcgaattggcgaacgactcacattaaattgctttgccatttgattttcagtgagtaacgtaccttcagctatgtgaccattcacaatgcctaagcgtaattctgccgcgataccttctccagttgtcataccttccaaccatttctctggatatccatacatcatcaaagtcactccttcattacacgacatacttgtatacaagtatgttaatatagttattatgagtttgcaagcgctttctttacgagcactaaaatagtgaccaccccttttcgatttaaatttaaaggaaatggtcactatcacacgaatgatttaattgttatgttgtatgtgggatatttctaattgttctgtactcatatgcgctttaggtacttcaatgcaataatgcgtttcatgacagtttggacattcgaatcgacgtgttgtcgctgtatgtttcgctttgataactgcccacaaagatggtgagaatatatgctggcagttaggacataaataggcaaccttttgttggtaataaaaagtaacaccaatgccataaccaatcataaatggtaaagcaattaaaaacggccatttatttttcatcaaaattgcacttataatgctagaatattgaattattcctataataccagcactaatccaaatgttacgacgaatacttttcatttcagctgatttactcatgacatgctctatgtcttttaagtgtgtgattggagacgtcgacgcttcatttacgtaatattgaacatttttaattttgtttaataccgcttgttgctgtttaacttgttggttaatttcttgttgtttcatagttagtaaagtattgagcgtcttcaaagtaccttcaccttttagcaacatatctatatcgcttaacgcacaacctaaatctttaagcaataagattaactctaatgtttgtcgctgttgttctgtatacacacgacgctttccttctgtaaatccttgtggtttcaaaatacctttgcgatcataatattgaatcgttcgtgttgtcacattgcataattttgcgagttctccagtcgaatagttagacatagattccacctcctataattaccatagttgatgacccgacgtcacgagcaagtacaatttccacattttaaagaaatttattatactaggcgtcttatttttatgatttcgtaccatgttgatttacaaactcactcaaactaagtaacacacctactaaacatctactctgttatttcagaatgaatttgttgtaatttatcttcaacttcagtaatctctgtcgcacattctttcagtaaatctcgatacttttccgtctctgcattgtttttataacgtattttatgttctaaacttgcccacatatccatacctatcgttctaatttgaatttcaacaggcaatacctcaacgcgttctgctaaaaagactggaatagatacaacgatacgtaaactgcggtaaccattttctttagggtgctgaatataatctttacgttttatcaattgtacgtcttcttgtttaagcaacatctcttcaatcaaataaatatcatctaagtaattacatactacgcgaattccggcaatatccagtatatgttctttggcagtttctgcgctaatctgtaatcctttacgattaagcttttctattaaactacgcatttctttcacacgtcgctccatatgatgtataggattgtgtttataaatgtgattgaaattgtcatctaaaatactcagtttagtgcttatttcctttagtgctgacgaataaatatgatctaactctacgaaacctaataacgtatcaaatgcttcatcaccattttcaaatttacttaaactatttttaaaatcatgtcgcaaatcctctaaatatagtgatggttttcgatctacatacatttttatactaacctccgatatataatcatctttattgtacctaacattttattaagataatactaatacactatcgaactttgggctgatactgaaacagcacaaagaaactcaaacaattcgaattatgtatcaaaaccttcaattacaggaagtgattttaaaatgatttaacgcaaaaaaacacctgttaccgttatataggtacaagtgcttaattgatagagatgttatacgtctttaaatgattccacaacttttggatgtggaccatccataagcggttctctttgtcgaacgccaccactttggttgccaattgattcgctatcaaagtacgatttatcttgatttgattgttcttgaatatgttcttcattatcagttgttgcatattcactatccacctctgttttttccattgttgctgtatggaattgtacgaagttctcttcttctaatgctttgatttcttctttcgataacgctcgataccaatctttcgcttttttcgccgcaataggaacaacatctttttcaagatatccttcttttaacattgcattcgcaatttctatcgctttttgccgtttaattacttcaaattctttccatttttcggggtaacctttcattgtaaagggcattcccttaacctccaatatgttataattcatgttatataccaccataattataaaatgaaacatattaaacacaattttttagactcccgtcataataacttcagacaaacgttagtctgacctgataaatatttaattttaaacgttcttgtctctctcacgaaaaccattgtgttgaatattcatcattgctgattgaatataattatactgtggtaaatctggtaatatctttatttctaattctgtatttaattcgaaatgcttagcgatgttttcaaatattgctaaatactcgcccattaattgttcatttattgtaagtctatcttcattagccatggctctatttaacataaagctaatttcttctaatgcgaataagctaggataataattttgaatcaatgtcttatcactaaataattcaccattagctgcattataaacttgcgtcatgttatttaatttcacagataggttcatagccgtgtttttctgatacacatcatctttatattgattttcagaaaataaataatgaaagagcgttgcttctttacgaacaacttcagccattacattaggaagcaatgcggatgcggtacgttgtccaaggacaaataaacctatgattgcaatcacaatacccattgcaacgtcaataactcttggaaacgcaatgttaattgttaaattctgtgatgctaatccgttcattaaaataacttgtattgtaataaaaactactgcaatcgcataatttgctcccaccaatgcttcagtaaacaatgctgcaatgcccattaaaattactgcaacaggtgttggtattgaaaacaacaatatgactgaaagtactaacacacctaaaatagtacctaaacctcgtgccatacctctctcgattgcatgtatagttgatgttcctagtaatattgtatgtgcagataacggtatccagtatgctttttcaaaatcaaacattaacgcaataaatatcgctatcatcataatcgctgtatatctcaatgtatttctaaaaacaatagagtctaatgttaaattttgataaatgcgtttactatataaaggttttcgcatgtctgcttcatacgcaatacgcgcttcatttgcatgcaccatttcatcaattttcaatatatggttgaataaattttgaaattcctctgttactgtcacttcttttcgccaatatcttacattttcctcactattatctagttgtgcaatgatatgatccatcatttcaattaactcatctggcaatggtcgaatttgtttagcgttcaactctaacagttcagaataaatcccttgggcagatgtgtgtaataataataatttttggaaacgtctacttaatttatcgttacttgaagtagaagtgattaataatttatcagatgctttaaaactatccaccgctgtttttgctacttgtaaaaaagcagatttatcattataagtgtgtaacaacttagatatgagtttaaaatcattttgaattgcttgttcttcagctttgtttttagaaaatacgatcgtgattaacaccatcatagtggcaagtataccgcctactaaaatcgcaaagcctctatataatgcttcttcgggagctataggtaagttaatgggtagactgaatgtcacaatgaagaatgtcgatgacggtccagctatttttaaggcagtaaatatataaaatggtataaccgtaacaattaataatgtcattccaaaaacgagtggcgttttggctgttagcgtaccaagcatcatacatattgcaaacgctaaattacaaattattacagttcgcagcttagatcgcgacggacctttaaaaacataaatatgggctagtgttccggttgcaactaataatccaaattggaaattaccacataagtaaccgattattgcaggaataatcattaacagtccctgtcttacacctttataaaagtctaagttaagtcgattgatttttatgagtgatgtcaaaaagatgtcatttcgacttctcctttccttgtcaaaatatttccataatctttttattagcatagttaaaatgaatttgttgctataaattttaattacgcaacatatgtcattataacaccttatgctcaattatctaaatttaaaaacttttaaagtccaattaaaattaatttctaatgttatttaacatcgttgaacctttggtcgcccacctttgcgctagttaaaatttatatgtacttttacaagcgttacctgactaatgttttaaaaccttatttctttacatatatcatttcaataacttcattttcatcttaaaccatatctgttttaaaaagtttcaatttcaacgcaaaaaaagcaataagccccaactatgtgaaagcttactgcttgtttaaattatttttctattgctttatcatcactaacaattaaaggttgatctggtttcacatagaaccacataatcacagcgattactgctggaacgattaacaattggaatgtcattgtccaacccaaatgttctacgaatagacctgctaatagcggactgattaatgcacctatattaccccataagttcatccaccctgatactgtaccagagaagttacgtcctaagtcagttgctgcagcccaactcatacccattgaaataccgataccaccaagacctagtgataaccagaaaatacttacatataaatttcctgtgcgtacagcaaagataattgaaactgcaaacacaataaatcctgcaattgcaattacacctctagctacgaattttgaacgacctaatcctaatacacggtcagaaattgcacctgctgataagattaagaagaacattaataaccaaggtaatgaactaatgctcatttctttaaagttaacgtggaatacttctgttaaatacgtcggtaaccaaattaagaataatgtaatgataaattgtacaacaaagtattgaattgcaattgcatagaagctaaaacgtttaaagaaatcattccatggtggtgatgacttttcagtagctacgatatcacgattttccataatgaaacgtttctccgcttcattaaccattctatgttgctcaggtaagtctttggcaataatcgcccataatacagccattaaaatacctactgcaccaaaaatgtaaaatactgcttgccagttaaatgcgttaacaatagcaattgtaactattggtgctaatacaggtccgaaatatgatcctgctaataatgcacttgatgctctacctttttcatttttagagaaccaaaatgaattaaacacagcattagaagggtacattggcgcctcacctacaccaaataagaatctcactaaataaattaaaccgtggttcttaatcatacccgttaagattgtaaatgcactccaccaaactaatgcaattgtaatcatcttacgtggaccgaatttttcagccaacatccccgatggtacttgcattaatgcataacctagagagaagaatgatgccaataaaccaaattgtggttttgtcatccctaaatcatccatcatttgcttagcgatatatgaaatgtttgctctatccatatacgcaataaccccaataaagaagaacgcaagcgcgaacatccaccttacgttagttcgtttttccttcataactattcctacttccctaattaattttttaaaacttaccctgaaacgttaaaattttcggacatctggcatgtccacccctactttgtcacaaaattgtaccaaagttattttttataatattatcagacatggaaagcgtttacaatagaatctataaaaattttattaaattccgcttaacttttgctattaaaacgatataaaggaacttttagttacatagtagcctatcgtttgttaattaaaaatactgcaatcctagtgttttaaaacgtatattgcaggctttcttacatattcgacattcattttaaattgcatataactacattaaccattcattgtgcagcgcctgttgtttagatgatcatttattgactttttgctcttatagcaagcaattttttgatttattgcttataatacattttaagacaaatgtttgtttcaacatcgcatgcgacatcattaattattcatttaaatttatccagtttctatttgtctgcaattgctgaaaattaaaggagcttatttttaataatggaacaaattatcactgaatttattagccgttttgggtatgcagccatttttatattaattttattagaaaatgtactacctatcgtaccatcggaaattattctgacatttgctggtcttatgtctgttaaatcacatttatcaattttaactttatttattattgcaactatcgcatcgtttatagggctgttaattttatattatatctgccgtttgatttcagaagaacgtctatatcgttttattgatcgacacggtaagtggattaaattgaaaagtaaggatttaaagcgagcaaatgattggtttaaaaagtatggcgtatgggctgtatttatctgtcgtttcatacctgtattacgtgtattgattaccattccagctggtgtaaaccgcatgaatgttgtgacatttaccgttatttcattaataggtactacaatctggaatttcggtttaattttactaggacgcactttgagcgatagctttggtatgttgatgactggtcttcatacatattcacgtattatgtatgttgtcatcattatcgcagtcatttactttgctatacgttacattggcaaacgtaagagagtaaaataatattgttgttagcataaaggcatgaattttaaatttctataaacaaaaagcagtgaatcattccatctattgaaatgattcactgcttttttaagtttatttggcatactttagctgaaagtcaactatctttatataaagaaatattactattaacatgatagttatagttgtgaagtaaaaggctaccaacggctgagaaatgataccaattaataatgcaccgacagtcattccaatatatctcacaaaattaaatacacctagcactttcccttttatatgttcaaaccttttagaaattatagtagacagcaaagctggcacaataccaacacaagtacctaatataaatataattactgataatataattacatttgattcgtttaaccatccaaacaataacgtaaatatagcaaatccagttatagtaacacgaagtatcattatttcattatatttttttgaaaatcgcttataaaataaacttcctaatataacactaacagtaataggtaaaaacaaaactcctgatattccaacgcctatatcataggtattatttaataatgttggtaaataaactaatattgaaaagtacgtaaaaaatattaaaaatcccaatgtcactaaagtaataaacactttatcggtcaaatatttttcttcaattttttcagttaattttacaatccctttttcaacatttggaatatcaataaaaaagataatcaaaaataatacgatagatataacgagcaaaaaactaaaaataccaatataatcccatcttgcacctaaagtactccctaagattggtgccaaagctggtgcacatgataaaaatatttgatagttcgccatagcttgagctctaccattatctgtacttagtttggctaataaagttaaagtcacgagaggaataattccgcaaccaattgcttgaaataaccttgatatagcaaataatataaagttatgtgtcactgcacaaataaagctagatatgattactattcccaatcccgttaaaagtacttttttcgaatcacgagaatctatacttctaccaagtacaatttgcataactgcaacgataaatataaaaccgccaactgtcgcatttatccaaaatagtggtacttgaaaatcgtcatatagtctcggaataataggcgtgtatatgttttgaatcaatgatgcgaaaaatgctaaaaatcctagaatatataatctgatattactattaatcatttaaaccatcttctttttttaattcttctatactacggtttaaaaactctataataactgccatttcatcatcatcaaagactttaagtacctcttcatatttttttaccgatttttcatgtaattcatcatgtatataagataatttttttcctttttgtgttaatgaataattaacttctcttttgttaaattcattgtgcgattcaactactaagtctttcgctaaaagtttttttatcgatttagtaattgctggttttgatacatttaacatttcagacaaaaatttattattcactttatcattattatcaatcaactctatgatatgaaattgtgttagagataaatctagttcctcattttcctttttatactgtcttcttttatcggcattttctctttctataataaattgttgtaattttaaaataacttctctcttcatatccactattattcctcctcttcattagttaaccggttaactatattattgttgtcactcccatttttgtcaaatattgttgtaattaacatatatttacttagttatgcaccatttattccgcatttcacaaatccacctataatacaaactatcattttaaataagcagaatttaccctgtcttccacacaaattgttttcgacactttaatgtgcctactatccaaaaaagttactcataacaaattgcgcattttaataaatgtagcaatgccatttgcatgctgcaaaaatactcgtattcatatttatgttttatattattaaagttttttaaatccatatttttataacacttgctatgtgataaaattaattttatatataaaatcttaagattcagattatttaatagcaaaggagatagtgatatggatgttttaacaatagaacatttaacaaagaagataggcaacaaaacgattctcgaagatgtatcatttaagctgaaacgcggacaaatagttggtctcgttggagcgaatggtgcaggtaaaacaactttaatgaaagttatattaggttactctagtttccaaagcgggaattttaatgttattaacagcaaggacagcaaaagcaatatcggcgcattgattgaaaatccaggaatatatccttttatgtctggatatgaaaacttgaagttattgaatgaatcaaaaaacactcaagatatcgataaaattgtctcacaacttcatatggatgaatacattcataaaaaagctaaaacgtattctcttggtatgaaacaaaaattaggaattgctatagcatttttaaataaacctcaattcattatcttagatgaaccaatgaatggcttagatccaaaagctgtgcgagatgtacgtgaattgattgtccaaaaagcgcaagaaggtgttactttcttaatttcgagtcatattttaagtgaattagttaaaatcacaaactctatccttattattaacaaaggtaaaattgttacagaaacatcggaagaagaacttaaacaatttaaagataatgatttagaaaatgtattactagaaatcatagaaagggaggaccaagcataaaatgggaactttaattaaacaagaatgtttcaaattatttaaaaagaaatcaacttttatcgcacctattgtctttattctactaatggttgctcaaggttatattgctacaaaatacaatgaaatttttacgccacaggaatctttcacatctgcttataatggtttttcatggtttgcatttttattaattattcaagcaagtacaatcatttcaatggaatttcattacggtacgattaaaaatttactctatcgtgaatattcaagaacaactatgattgttagcaaaatcatcacattatttattatttctttaatttattttgttattacaattattgcttcaattgttattgggtctttattctttaatgatttaaatatatttgaaagtagcggtaatcaattatctttattgaatcaattattattagttagtttaggcacatttgttggcgtttggttagttttaagcttaacgttgctattatcatctgcaacaaattcaacgggagtagccattgctgtaggtattgttttttattttgcaagttctattttagcagttattcaaacggcacttttagaaaaaatagactggctaaagtggaatcctattaatatgatgaatattatgcttcaaacagttgaaaaaggctttagtaagtcgacaaaattagaacttcatgaattgtttattggtaatattgcttatatttctattttcttaatacttgtagtatttattttcaagaagaaaaatatttagtaacttaaagtattaaatgtctaaatacacacatattccatcgtaattcaaaatcattttcaaatcccttcacccaaataatggtgcggggattttttcatccaaattttggaaattccacattttacatatcgtaattttttaggaaactagtgaatataacaaatccctcctctcatttttaaaatagatatatcacttccccacttttacttaactaaactgcaacggttcctaataccaaaatcctgccctctatttttatcaattcaagcatacttattgaaaaatgttaacgttttcttgataatcattgtaagcgcatttattttataaactaacgtttgaaatatactacaggagtgacacgtaatgactcaaattactgaaaaagaattaaaaaagaagtatttagatttactatcccaaaattttgatactccagaaaaacttgcaactgaaattatcaatttagaatcaattttagaattacctaaaggtacggaacatttcgtcagcgatttacatggtgaatatgaagctttccaacacgtattacgcaacggttctgggaacgtgcgagcgaaaatcaatgatattttcaaagagagactttcaactaaggagcttaatgacttaactgctcttgtctactatccagaagacaaattaaaattgattaaaagtgatttccaaaattgcggtcaacttaatgtctggtatatcacaacaatcgaacatttaattgagttaattaaatattgttcttcaaaatatacgcgttcaaaactgcgtaaagcattgccaaaacaatacgtttatattattgaggaactactgtataaaagtaatgaatatcaaaataaaaaatcatattacgaaacacttgttaaccaagtaattgaacttaaacaggcagatgatttaattattggactcgcttattccgtacaacgcttagtcgtcgatcatttacacgttgtcggtgatatttatgatcgtggaccacaaccagataaaattatggatacactgattaattatcattccctagatattcaatggggtaatcatgatgtgctttgggttggagcctatgctgggtcaaaagtatgcttagcaaacttacttcgaatttgtgcacgttatgataatttagatattatcgaagacgcttatggcattaatttaagaccactgcttactttagctgaaaaatactatgacgcagataatcctgcttttaagcctaaaaaaagacctgacaaacacgaacgtttaactcaacgtgaagaaagtcaaattactaaaattcatcaagctattgcgatgattcaattcaagttagaaataccaattattaaacgtcgtccaaatttcgaaatggaagaacgtcttgtgcttgaaaaggttaattatgatacaaatgaaattacagtttatggtaatacatacccattgaaagacacatgtttccaaactgtcaatcgtgataatccagcagaattactacctgaagaagaagaagtcatgaataaactattattgtcattccaacaatctgaaaaattacgtcgtcatatgtctttcttgatgcgtaaaggctctctttacttaccatataatggcaatttactcattcatggttgtattccagttgatgaaaatggtgagatggaatcatttgaaattgatggtcatacttacagcggccaagaattattagatgtgtttgagtatcatgtccgtaaatcatttgatgaaaaagaaaatactgatgacttatcgacggatttagtttggtatttatggactgggaaatattcgtcactatttggtaaacgtgccatgactacgtttgagcgatactttattgcagataaagcttctcataaagaagaaaagaatccgtactatcatcttcgtgaagatgtgaatatggttcgtaaaatgctcagtgatttcggattaaatccagatgaaggacgcattattaatggtcacacaccagtgaaagaaatcaatggcgaagatcctatcaaggctgatggaaagatgcttgtcattgatggtggcttttcaaaagcttatcagtcaacaactggcattgcaggctatacactattgtataattcattcggtatgcaactcgttgcacaccaacaatttaacgctaaagaaaaaatactttccgaaggtatcgatgaactttctataaagcgcgtcgtagataaagaattacaacgtaagaagattcgtgataccaatattggtaaagatcttcaagctcaaatagatattttgaaaatgttaatgcatgatcgttacttagactaaagacgacatttgatgcatgtatcgtgcacttatttagtggtactgtgtttacgcattggctacgcaaacacgatgataaataggcgacctagctacaccgaaaaaaatcccctcactattgcgagtagtgaggggattggtgtatctatgctaattcctgttaactgtattataacaactttacagcaaaaaaatgcaaaatcaactaataaattaatgaaatgaccgacaccctcgcttctactccaatttaacaaaatactatattagtactatatttttcattaacatgtatgttacattttctatattacttaaaattacgaagggacatttttaaatcatgcgtatcttaaaagagtccattattgtggcatttgcctttgttggtgttgtcgttggtgccggctttgctactggtcaagaaattttccagtttttcacaagtcatggcgcatatagcatttcaggcattattgtaacaggactattgattactttaggtggaatggttgtcatgcatacaggtcatcatctaaagtccagaaatcattctgattcaattaactatttcttatacccctctattgcaagaggttttgatattattttaacaatgtttatgttgtctttagctattattatgactgcaggtggtgcgtcaaccattcatcaaagtttcaacttaccgtattggctgagcgcactcatattagtcgcctttattttagcaacactgtttctaaaattcgatcgtttaattgctgtgcttggcggtgttaccccatttttaattgcgattgtcattatgattgcggtctactatttcacaacaagtcatcttgattttactgccgctaataatgatgctcagattcataagcagaaatcattatcacctggatggtggtttgatgcgattaactatgcaagcttgcaaattgctgctgccttcagcttcttatcagtgatgggtagtaaagttaaatatcgtgactcaacgttatacgggggcttgattggcggtttaatcattacatttttactcatgatgattaatctaggtttaatttctcaattcgataaaattaaacacgtagatctacctacattaaaattagcgacacaaatgtctccgtcaattggtattattatgtctgtcattatgatacttgtcatctacaatactgttgttggattaatgtatgcatttgcgtcacgtttcagcgttccattcagcagacgttacttcatcattattattacaatggctgtcatcacttatattagtacatttatcggtttcatttcattaattggaaaagtattccctattatgggattgttcggtttcatcttactcatacctgtactctataaaggtttaattaagcgtattaccggcaaatctcatatcgattaaaatatctatactattgtaaaatttagtacagcacttcaaaatcaaaaaagcgggcagatgaaaagtaaaaatcttttccatctgtccgcttcttaatagaactgttatttcccaagtatttgttgaccagccgttaatccagtttctgtaatttcatggcccttcacccaaacttcttcgacttgtgccccacgtgtattaaacaagttaatgacttgttcacttgcagctaatggcacaattggatcatgtttccccatagaaagcaacacactgacatctgataaatcctttgttgacgttacttcaactgggtataacggtgcatataacaatgcttttttaaatgatgcttctgaacgcaacattaagttaatcgctatatttgatccatttgaaaatccaacaagtactgctttttcaatatcaaaatcataacgttcagcagcttctttaatgaacgtcaacaattcttgtccacgaaatgccaaatcttcttcatcataaacaccttcaccaagacgtttgaaataacggttcatcccattttctgaaacttgtcctctaatacttaacaagtgataattttcattcaatgcttcgcctaacggtaataaatcgaactcatcaccacctgtaccatgcaataatattagtgttggcgcaccattttgtccttctctaaaaatatgttccatcacaaatcctcctcattccaattaaccatgttgacgcttcgtattaaaaggtctaacttccgattcaatatattctcttttattttctaaaaatggtggtaaggataacccttcgcctaatgtttcataaggttcatcttccataaatcctggtccatctgttgaaatttctattaaaatatgccccacacgtgcatataatgcttcaaaatagaaacgattaacgatgcctgagttattaatacctacctctttatatttcgttgcccacgcttctattgcatcatgatctttcacacgaaatgacacatgatgtacctcaccataaccttgacgtgctgctggccctttatcatcttttattaagattacctggccaccattgcctccttcgccaacttcaagtaatgcgacattatcttcatgcgcaatagttgtcataccgtaaacagtctctaaaatatttttaaagtcgtcaaaataacttactttaatttcaatggggcctaatccataaatcgctttatctactggaaccggtccattcttccaaggtacaccaggtgctaccccttcatttaactcatctgaaattaattgatacacttggccatcgacttcttcaaatggcaacacttttttaccaaataattcttgaataccttcgtgtttaacaccaaactcatcaaagcgctgttcataatatgttaatgcgtcatcgttaggcactctaaaagacggtcttgtaatggaatttgttcctgcctgcccttttgtaatatttggaaaatcaaagaacgtcatgtctgtacctgccgaacctacatcatctgcaaaaaaagtatgatacgtataaatatcatcttgattgactgtctttttaactaaacgcatgcctagtacttctgtaaaaaatttataattacgttctgcatcatctgtcattgcagtaacatggtgaatacctagtaattcatgattatttatcattttatataccctctttatatttttagtgcatttatctcgaaatcgagatactttaatgtaaatttttagtgcacgccttacacttctgtagattgtgcacttagtttcttaaacgcttgttgtaagattgttaattcatcctttgttaacacatcaaacgcttttgttaatgtctcagcatgcttagggaaaatatctgccatttgactttgacctttttcagttaaacaagccatatatacacgtttatcatctttatccttttcacgtgtaatccaacctttgtcctctaattgacttacaacatatgaaatgctgctacttgcaattaatacgcggtctctaatacgttgaattggttgcggacctttattataaagcaactcgagcactgcaaattcagtaatatttaagccatatcgctttacgtcttcttttgtaatttgctctaatgtgtctaacgccctattcattccgacaaaaacattgagagattgtttcgttcgatccatatgatcaccaacttttttattttatttcgatttcgagataaattatatagctgaatagatttaatgtcaagatacgtgttttcatcttcatttcaaactgtgcttaataaaaacgactacatagatgtggcaatgtcgtcacatgactgtcatgcacctttgacttcgtttaagttaaaatagaatagggaaatactataatcaatcatgataggagttgatatgtatgagtaaccttgaaatcaaacaaggcgagaacaaattctatattggtgatgatgaaaataatgctttagctgaaatcacataccgttttgtggataataatgaaattaacattgatcatacaggcgtatctgatgaacttggtggtcaaggtgttggcaaaaaactacttaaagcagttgttgaacacgctcgagaaaataatttgaaaattattgcctcatgttcatttgccaaacatatgttagaaaaagaagattcatatcaagatgtatatcttggttaaataaattttgcgatggtgcaactgtaccatcgcttttttgttcgcatcaatataaaattgcaaaacgactagttattttgcatttcaaactttatgctatcaattcattttcttttctggtatactttttatactaacttatagaaaaatagaaaaagaggcgatgcataatggcatttcacgataaaacagcaacacaagtgacaaacattgtactgaacgtaagagacttagacttaatgacaacattttacaaaaacattttaggactatccgttaaaagttctgacgataatacaaccgtattatctgttgggactggtggccatactctaacgttacatttattagaagacggccgtcagacttccccacgtgaagcagggctttttcatatagcatttttattaccaactactgaggatctagctaacttcttatatttcgtggcacaaaaaaatatgggcatcggcgctggtgatcatttagtaagtgaagctttatatttcaacgaccccgaaggtaatggtattgaagtctatcgcgatagaccttcatcttcatgggaatggcaaaatggcaaagttaaaatggatactttagaagttgatagccaaaccttattaacacatcgtactgatgaaggttggcaaggaatgccagcaaaaggcatgattggacacttacatttaaaaacacatgatttagacgcagcatatcaatgttacattgaacaattaggattccaacatgtgtctgattttccacgtgcgctatttatgtcaacgaatcattatcaccatcatattgctgctaatacttggcaatccaatcaagcaagacaaaacaattcacaaagttatggattaacacatgttgatatttatcaacccgacgcctcaacacatacatttacggcaccagaagggtttgacatcacagttcattcaaatactgaccttgttccagaaaaataatcatccatactttattaatacaattttttcacgcaaaagcctgcgattcatttatgtaatcgcaggcttttttattgctaactttttaattttatatatttagacatacggtattctatttattcttttggtccaacccattcaataacatcttcataagcttggcgtgttttatttttcggtggctcttgttgtctgtagccaaatgcgaccatcactgataaaccaaattgctcagtatctaagatccctttatttgctaaaatgtctgtcactgtatccagactaaaaccttccatcggacatgaatcaatacctaacaatgcggctgtcgtcatcatattgcctaatgcaatatacgtttgtttacttgaccagtcatacaaggcttgatcattatcagaaatatggaaatctgcttggaatgcatcgaatttttgttcaacagctggaatcgtttgtgcctcatattttttaatatctcttaacatatgttgtacatacggtgatcttgacgttacatttttacgcgcaaaaattagcacaaaatggctcgctgtatctaattgttttgctgcgccccaactgtgcgcttttaattcatcacgtaacgcttgatcttgaatcacgacaaacttccaaggttctaacccaagagaacttggagacaatctacctgactctaatattgtttcaaaatcttctttcgaaactttcttttgtggatcgaattgcttagtcgcatgtctgaaatgaaatgcatccataattgtttgattcatattgctcattgaacatagcctcccatttttatatttattgctatacaaattatacttcatgttttaaaaagactaaagtaatccgtttgcaattcactataacttgtgcacatgttataagttttctgcaataaaacacacttttgaattttgggaaatttagtgttataatatatttgtgatatttttcacaattaaattgtggcgtgattttaatgtgcataatctttaatttcactcatttacttttcaatcttttaaaagcgaggtttttaataatgacaaaaattatgttctttggtacgcgtgattatgagaaagagatggcattaaattgggggaaaaagaataatgtcgaagtaactacttctaaagagctattatcaagtgctacagtcgatcaattaaaagattacgatggcgtaactacaatgcaatttggtaagttagaaaatgacgtttatcctaaattagaatcttacggtattaaacaaattgcacaacgtactgctggatttgatatgtatgatttagatttagctaaaaaacacaatattgtgatatctaacgttcctagttattcacctgaaacaattgcagagtattctgtttctatcgccctacaattagtgcgtcgcttcccagatattgaacgccgtgtacaagcacatgattttacttggcaagcagaaatcatgtctaaaccagttaaaaatatgactgttgcaattattggtacgggtcgtatcggtgctgctacagctaaaatatatgcaggatttggtgctacaattacagcttatgacgcctatcctaataaagatttagactttttaacttataaagatagtgttaaagaagctattaaagatgccgatattatttctttacatgttccagcgaacaaagaaagctatcatttattcgataaagcaatgtttgatcatgtgaaaaaaggtgcaatcttagttaacgcagcacgtggtgcagtcatcaatacacctgatttaatcgctgcagtgaacgatggtactttgttaggtgctgcgattgatacttatgaaaatgaagcagcatacttcacaaatgactggactaataaagacattgacgataaaacattattagagttaatcgaacatgaaagaattttagtaacaccacatattgctttcttctctgatgaagcagtacaaaaccttgttgaaggtggtttaaacgcagcattatctgtcattaacactggtacatgtgaaacacgtttaaattaatatatatatttaaaagcaaaggcgcgccatgtgcctttgctttttattttgtatatctgtatcaaaatcgatttgattaaaatccgctttattttatcatctattcaaatgattttagtgcgcttattttactatggcattattgcctaacctgtttgagatatattaatatttgatgattcgtattcaaagttttcatttaacatgtatttagtatcatgatagctgcttcattgatgatatactacctactttttcaacacttcttgttcgataatcgttaatacaccctgcttatcattacttggagcgacagcagaggcaatattgaacaattcttcatcatgactattttccatcacataactatgcttagcgaacgctaacatatctttatcattattcgcatctccgaaggccatgagctctgaaggagacatttcccatttatctaacaatcgttttaatgcctgccctttagtcatgtttggcataataatatcaatgctatcgtgcccacttgagacaagtttaatatcattgctgaattgcgttgctacttcttcgtcaacattcggatgcgtctcacgattaatattaaatgctattttgacataatcatcctcaggtaattgctgtagactgtcaatttcttttaactgatgataataaaatctcgtatcttctttaaacgcttcagaagtatgttttaaaatatacgcgcttttcaaaccacagatgacgagttgatcaatactttgcttcatatttaagtaatcgacaacctgttgaaacacctgacgattaaagcttttataattatataactcattgccattataaataactgcaccattttcagaaataaaatacatatctctatccccgaaaatagacttcaacttcgcatattgattgccactcgcagcaataaatgtaatatctctatttctaagttcagtaaaaatcgcttcaaatctaagtttatcatatgtcttttttgaatctaaaaacgtcccgtccatatctaccgcaatagccttaaccatgattatcctcctcattgctcttttagtcgtcttcattatatccatctcatgacaagcaatgaagtttgtcataccacaatgaacctatattcacattttgaaattgctttcatatatgcaaaacacattacactggatatagcattcagaggcgaacataaatttcagaatattgtaaaaatataacgatatatttatcatttagacaaaatatagtgtgatatactaatttataacatctatacataatgtgaaagaatttttaaaaatacaattaaatatcggtgtaataaatccctttatacataggagttgtatacatgaaactaaataactattctttaaaagttaaaaacaaacaactagttgacaattgtgatttaaatttctatcttggtcagatcaatcacattgttggtaaaaatggtgtaggaaaatctttattagctaaagatttcttactaaataatagtggaaatatccctaagtccatttctcaaaatgtaaccttaatatcaagttcatcaaatattcctaatgatataacaaaagattttttattatcattgttaaaatcaaaatttgaaaacaatcgacaaacattcgataagatttataacatactaaacatcgaagcaataccgtctaacgtactactaaaaaacttgagtgatggtcaaaaacaaaagcttaaattattaagtttcttattggaagatcatgatttaatcatattagatgaagttacaaacgctttagacaagaaaacagttaatgaaatttatgaatttttaaatgattttattcaaagccatcaaactaaaactattatcaatattacacataatttatccgatttaagtgctttgccgggtaaatactttatttttaaagaccttcaaatagaagagtaccaatcaaaagaagaagtcataaatgattacattaatttataattgaggtgtccactttgaaattagaatttaaaaaaagtatttccaataaaattatttacacgcttgttgtgctattcacattccttttcttacttgggtattttttaccaataggtatagacaaagttaaaagtttaagctatagccagtttttcttcagttcatatactgttgcaacgcaattagggttcttactattttcatttgttattgcatattttattaataaagagtattcgaataaaaatatcctgttttataaattgattggcgataatatctttaccttcttctataaaaaggtagcagtgttattttttgaatgtttagtgttcataattctaagtatcactattatttcaattatatattcggatttctcacattacttactattaataatcttattttcactcgttatcttacaatatatcttagttgttggaacgattagtatggtttcacctaacattttaatcagcttaggtatcagcattgtatattggattggttcagtcatcttagttgccattaataaaaatatatttggtatcgttgctccatttgaggcgagcaatacgatgtatcgtgccgtagaaaaaatattgaataacgagtcaacatttatgtgtcctactgaaattataaatatagtatcattcttcgttcttctatttatagttaatactattgtcttattactaagtagaaagagatggttgaaaatcggtatgtagtataaaaaaggagcggtatacattgccgcttctttttattatgtatttttacaatctccaccaatgacacgtcgtcattgctacctcataccaaacaaaaaacagtctcgcaatcaagactgttttccactcaatatattcatccattagcgtaatagattatttgacttctgtagctacaaagattttacgtttttcccaaacgcctgtcttttcattgtaatcatcacaagtaattaatgttaattgtttatctttacctttttgttcatctagaactcctacatctgtaggcttaacatctcttatacttgtcattttatacttacgtgtttcattaccaactttaaagtacaccatactaccttttttggctgctttaagatttgtaaattgatagttcggacggtcaatgaaagtgtgtcctgcaattgaaatattttgatcatctagtgattcattttcttctgcaaagcttacacctctatttaattgttcaggtgttgctggtcctggatatactggttctttaatatcagcatctggaatttcaatatagcctgccactttcgatttatctttcggaatttgaggtttagcttgctgctttttatctttactcgcctgttcttttacatttttatcatattgttcaatcttttcatctttatctttatcgtgaagataattatcgatatgtggtttagcaaacaaatatgctgccactaggataagtaccacaccagcgattgtcattaatcgatttgtccattttttcatacgttaaggctccttttatacatttcacaatgcctgttaacatttcatatagtataccattaatttcaaaatgactcatagcaattcattttatactataaaatttacatgtatacttttacgttagatttcattacacatatttgcattcaaataacgaaacgcttttaataattactaagggggaattgatatgattagatacgctaaaaaagaggatttaaacgctatattagcgatatacaatgatgccattatcaatactacagctgtttatacttatgaaccacaaaccatagacgaacgtgtcgcatggtttgaaacgaaacaacgtaagcatgagcctatctttgtatttgaggaaaatggaagtgtcttagggtttgcgacgttcggttcatttagaccttggccagcatacctatatacaatcgaacattctatttatgtcgatgcttcagctagaggaaaaggtattgctagtcaattactacaccatttaattgtggaagcaaaagctaaaggttatcgtgcgctagttgcaggcattgatgcttccaacaaagcgagtattcagttgcatcaaaagtttgcttttaagcatgccggcacactgaccaatgtaggttttaaatttaatagatggttagatttagcattttacgaattagatttacaagactagtaatgtttgaatcacataatataaacaagacaaccatgttaattcccttaacataacaagccaacatataaaattttaaacttctcaggggagtgggacagaaatgataaagagccactaatgatttattatgtagtggttcttacacattagccacagctaatgtgtacttaaaaataggaatacatgagtaaaactcatgcataagaaatactaatttctatagaaaaagtatttctttatcgtcgtcccaccccaactcgcacattattgtaagctgacttttcgtcagcttctgtgttggggcccaaaaagcttgttacaagcgcattttcgttcagtcaactactgccaatataactttgtagagcatattacattgatttacattgtcccttttatttattcttttcaaatactatccccatagctttgatttaacgctttttctcaataacaaaacgaatatagtagaacatgaaaacgataatcatgctgagcgataaagatttaaataatagattgacccacgttccctcagtcgtatatccatatgtaatcgttgtgttaatgatgaatgctataaagatgattgatagtcttagcatatcatcactccttttaagttattttagatatacgggggcgcttttgcaatcactattttgattagtatgcattttccataaatctttcaacttcttcagagataattaagaagcatctatctggtactaatgatccagacagatgcttcttttttatcaatattttattgttatctcattaattatttttaaccatatcttcagctgtgccaaagattttacgtttaattgcttcgccagttggtgtgcctgctagtccacccaatccagtttcacgtaatgatgcaggaaggttacgaccaaccttatccattgcttcaataacttcatcaacagggattctactttcaatacctgctaatgctaaatctgctgaaattaaagcgttacccgaaccaattgcatttctcataacacaaggaatttcaacaagtccggctactggatcacaaactaaacctaataaattacttatcgctaatgccatagcgtgcccggatgcttctggtgatcctccgaatatagctactgctgcagctgcggccattgcagatgctgaaccaacttcagcttggcagccacctgttgcaccagctacacttgcattgtttgctacgacacgcccaaacaatgctgaagtgaataagaaatcaatcatttgctcttctgttaaatcatgtgttttttctaatttaaaaagtgcaccgggaatggtacccgaggaaccagctgttggcgttgcacaaataatacccatcgcagcattgacttcatttgttgcaatggcacctttgactgcgtcaatcatttcatatccagacaaagcatgatgtgtttcattataatcacgtagtttagcagcatcatgaccagtgtagcccgttacactttcaaccccatcacctgtcgtccctttgattactgcgtctcgcatgacatctaaattttgtttcatttgcgctcgcacttcatcacgtgatttaccgcttaattccatttcttctttaaccatgatatccgcaaatgacatattattttctacggcataatctatagtctctctaattgaatcaaacatgtttattccccctctaatttatataggaaacgtttacgtcactgtatttctctttaattgtatttaatgttgattctgagattgctttatttaatggtattacaaccaagcatttatcttcatctatcttaataaattcatctttacagtctaatttcatatcgttgatatcattgatgaaatgatttacttgtgctttagtcatatttccgtcaacaactaaaattggtaatccatgatttaaatctacttctagtccatttatatgaatacctttaattttaattgtaccaccaccgattgaaataccgataatttcaatgtagcgaccatcattacgagatgatttgatataagcacagtttggatgttgaccaatactatcgccttcttcttcgatgatatctattttaataccatcatcagctgcaatttctaatgaagatttaattcggttatcaaatgttgaatatcccattgctccacccacaatagcgacatctgtaccatgtccttggtgtgtttgagcaaatgattcataataatgtatttcaatatttttaggaatatctcccaatattgcgcgtgctgaattcccaatctttactgcaccagccgtatgagaacttgaagggcccatcataactggtccgataatatcgaaagcactttgataatcatagctctttgccataattaaacactctccttaatatgattctttttgctcggcattttaaagttgatattcattaaattaaacttattaattagtgttccaataatataggctaagacaatgctgacaataatcactgttgcgattgttacaattgatgtcactgcattattaaagccaaacaatacgatggcgcctgcaattggtgttgccatacctttgacacctattactagtccgctaaatgtcacgatacatgcgttgacgaccccaatcagtgcatttgtaccatatagttgtactggatattgcgctattaaatcaatttgcgtcaatggctcaatacaaactgcaaatgcttttgacggtccaccaatgtttaattttcggaataaaataaggttaacaaatgagctacctgtacatgttagtgctccaatagccataggaacacctgtcagtcctaataaacttgttaataccattgaacttagcggtgtcatacctgtaacaggaatcactagtcctaaaatgaccgctaatgcatatggattgttatcacctaccgcagtgacagcactacctatttgttttaatgttgctagcacaccaggtgtaatgattgatgcaagtccgaaagcaattgctggtgcaaataagatcaccacaattaagtccaagccttctggaactttcttttcaatccatttaattaaaaaagctacgccataagctgcgatgaatgctggtaataatttaaagtcatgtaatactaaaccaacaatgaccgcaaatactggtgcaacgcctaagtttaagcacgttagaatacctactgcgataccgcttaaacttcctgctaaatccccaatatcttgtagaaatttaatatcaaatacgccaccaatagcataacttaagaatgcttgtggtagaaatgtcgcacaagctgcaccggataatgcttgtagtccttgtttaccgtacggtgcatactttaaaaatagcgtcatgatcactaaaaccaagactaatgtgcctacacctaacagaatatccatttcccaaaaacctctctctatgtttattttattttcagaccataaacatcgtacacccttaagaaaacgttttcaacttttatctgttatcaaatcaaatatttaagtgaaatatttcatatttgtgaaagatttttaaaatggattgtttcaaaaactacttatgttgtcgttaatatttactaattaactttttactctatatttcaaacagttgtgtgacagttttttgataacttttttacatctgaaagtaagtaatatttctaaaaacttttaatatttatacactttatctttcgagctatttattttttgtttttgtgctgtgtttataaaaccgcacactatattcaaaaataacttattacacatatatttgcaataagataattaaagtaggatattatttttagttttctgataggaatgatgatagtctataggttgaatctttacttttttttaaagctaaatttacatcaacttaacaatggttggttatactgaagatgaaaatatttagtataacttagtggaggcgataaaggtgcaattgagtcattccgttaaagttgcaatttctatctatttagcacttatctttataacgttcacttcttatttagtcattattttatatacgagtatgactggacatgatgtatcacatttcgtgttagatagtcagcattctcatcatggatctcttacgcaaaaacatttgagtcttcctgaaatctcatttaaatagtttatcctctgtgtttcaacattcatttcccatatcgattcatttatctatcatctagaccactacatcttagatgatttttttattttctcatttcactctttcttaaaagtcgatataatgaattaaatcattatcatacaccgacatattttatgttgttggtgttaagttttaaaggggtgagatacttggcgaataatcattcagctttgcgtttaaaaggaattatacttgccattgtcggtgcttgtttatggggattaggtggtactgtttctgatttcttgttcaaatataagaatattaatgtcgattggtacgtcactgctcgacttgtagtcagtggtgttttcttacttattatgtacaaaatgatgcaacccaaacgttcaatatttagcgtattccaagatcgacgtatgttaggcaaattacttatcttcagtatactgggcatgttagtagtacaatatgcttatatggcatctattaatacaggtaatgctgcgattgcaacattactacaatacattgcgccagtttatattattatttggtttgtcataagaggcgttgcaaaactaacattatttgatgtgcttgctattatcatgacactattaggaacatttttattattaacaaatggttcattttctaatttagtcgtcaatcctgcaagtttattctggggtattttagctggtgtagcactcgctttttacacaatttatccttcagacctacttaaccgcttcggttcgattctaattgtcgggtgggcaatgcttatttctggtgttgcgatgaatttacgccatccaatttggcacattgatatcactaaatgggacatatcaattatattatttttaatctttggtattatcggtggtaccgcactcgcattttatttctttatcgacagtttacaatacatatcagcgaaagaaacaacattattcggaactgttgaacctgtcgtagccgttatcgcaagcagtctatggttacatgtggcattcaaaccatttcaaatcgtaggcatcattcttattatgattttaattttattactatcacttaaaagacaacctgaaacattagatgaataagaaaactctgataatcactttagcaagtaactattatttaacaacgtagttaccttataggtgatatcagagttttttattttagttaataatatttttcacttggtataaaaagcgtcgtcgctctggtatcggaaatactggataaatatggaattggtaatatccaggtataaagtcatgttcgatacctttcgcactcaacaattgcgataagttcaaagcatctgggtacagtacttcttttgtaccaacagttaatgtaatacgacctaaaccatctaagtcaccattaattggtgatactttgtagttatctaaaggtgtgtcccctgcccattgttcagctaagaacacactgccatccacacctaccattgggtctttctttaagtagtcaggaatttcaggatgctgcatcgttgcatctaaaactggtgaaattaatacaatatgtcctggttgcacaatatgtttttcttttaacaattgagcaaatgataaagcaatttgaccgcccgcagagtcacccattacaacgatttgtttagaatctgctacttgattcaataaatcatggtacaacttttcaaaaagcacatacgtcgcttgataatcttgatgcggaatcttcggatatactggcatgatgactttagcattgagtgtttctgcaagttcatcaataaattcgaaatgaattttgagtgggtcttggaaccatgcgcctccatgtgcatataatacaacgcgttgatgcttatcttgtttatcgttaacggtataaacggttgaaccgaagtgcttatccacttttactggcatcttaaactgataattggttccctcatattcgcctgctgtctgtggcgccattttttctaatgctttcatcgcttcttctttatacataaaacgacgcttagctctagataatcgtataccttgttctaacatataacttttcacactgcgtttttctttaattctaatatgtgcgtatgctgcaactaaaaatccaaacgcaagtgtagaccattttttacgcatttgtcgtcactcctctttgatgatttctactatagttctactgtaccatgctgattctaattactaccaatatttactgggaaataagttatgatgtctacataatcttagcaatgctaatcatttgcgatattaatgctcatcgacatcgttatttacactatcattcatttgcttaagatgatgttcaaaacgttgcatatcgataaaacgcccttgacgatgcatttcttttccattcataaaaattaaatccacaggtacagtgaaaatatttaattctccagcaatagcttccacctgactttgattaatcacagctaatggcacattgggatatgattgcatcaagtcttcaatttgtggtaaaacggcatgacacacgctacactgatcgcgcatgacatgtacaactgctaacggatattgatgaataaattcacggaatgcttcgacactatttaattgcttaaccatttcgaacaccttcttactttttatattttaaaatgaagtcattattttgttgctaaaatgtcttgaaacacttgtggcacagaggttatcttcttatcactcaatctgtaaaaaccgcctgtctgtgtaccaatacaatgcacgccatgtgcggacacaatttcaaactgaaacacccatttcatcttgcttgctttaactaagtaaatacgacctactggtttgtcatgtattgtgacaggtactttatactctgcttccgttttcataagtataggtgaaatgccttgattgatcattgttgagtaattcatgtgctgattaataaacgctgttctcaaatcttcgaaccatctaatataaacgatattactaacgacacccatcgcatcaatgtcgtaaccattcacttcgatttctttctctgcaactaatagaccttctgttgtcataatgacaaatctccttatcttacaaatagatttaaaatcatgttaatttatttttattactttcatgataaaaatacaagcaattgaactttattacggaaaatcaaacttttcaatgagactattaatttggctagtcgcgaagatgcatttttctaaaatgtgacaaaaacataagcaatgttttctatatctaacactaatatttaacttattatcatcaacacacctgctatacatcattgcgcactaaaaaggcagtagcttcattttaagctactgccttttgtaacgtattctctttcaactcgctacttcgcatacgcactacgaatgactaaaagttcattcatttgatatgctgtttcatttttaatcattatttgactgtcataattagcttacctggatcagcatcttgtacatcttcaatgacaagttctttattttcaagatttgtaataatcattggtgtaacgatgcttggtgcgtgtgctttcaagtatgctaaattcactttcattaatggttgaccttgtgttactttttcatcaacgttaatcagactttcgaatccttcaccattcagtttcactgtatcgataccaatatgaataagtacttcgacgccactttcagattctaatcctatcgcatgtttcgtagggaagattgttttcactgtaccatcaaacggtgctacaatttcacctttttcagggataaagccaacaccatcacccatcattttaccagcgaatacttgatcaggtacttctgataatggaatgatttgaccgatacctggtgcatagatgtctgttgttccaagtgcttctacgtgaactggttcatctgacatttcttcagtcactgtcgtttcacttggtttcgtaatttcaccactcataatcttggccatatcatgtttaatttgatctgattttggaccaaagatagcttgcatattgtttccaacttctaatacacctgatgcgcctaaagctttaatacctgctacatctacttttgatttatcaaccacttctacgcgtagacgtgtaatacatgcatctaaatgtttaatgttttcttttccacccattgcatctaagacatcaaatggtaattttgcgacactagagttacgaatttcagtttcttcatcttcacgacctggtgttttcaatttaaacttacgaattgcaaagtcgaataagaagtaatacacgatagcatatacaataccgactggaataactaataatgcgtgtgaacgatcccagtttaataaaccatataaaatataatctatgaaaccacctgagaatgtcataccaattttaacgcctaataaatgcattactaagaatgatgtaccagctaataatacgtgaattccataaagtactggtgctacaaataagaatgaaaattctaatggctcagtgataccagttaaaaatgcagttaatcctgctgataacattaaaccacccacgacttttttacgttctggtcgtgcatttttataaatagcaaatgccgccgctggtaaaccaaacatcataaatggatatttaccagtagtaaatgcaccagcagtaaatggtacgccatctttcaattgtgccatccaaatacgttggtcaccacgaaccaattcacctgcgtgatttgtataacttccgaattcaaaccagaacggtgaatagaaaatatgatgtaaaccaaatggaattaatgagcgttcaataataccgaatataaacgttgttaatgttaaatttttatttaataagaaattcgataaactatttaatccatcttgaattggtggccacgcaaagcttaaaagcacacctgttgcgattgctacgaccgatgtcacaatcggtacaaatcgtttacctgcaaagaatcctaaaaatggtggtagtgtaatattataaaatttgttgtaacaccatgcggctaaagcacccatgataataccaccaaacacacccgtttgtaacgttggaatacctaatactaaagcatgtgctggttctttcgctgcttgacttaattcttttgcccctttggcatatgagaaaatgtcatcaattgtaatgtgcaacactttccccattgttgcattcataattaagtaacctactagcgctgctaatgctgcaacaccgtctcctcctgctaatccaagtgctgtaccaactgcaaataataatggcaagttatcaaatacaacttgtcctgctgcttccatgaccgacgaaatcattacaatgatatcgttttttaaccatggtgcaatttctactaattgttcgttgtgcattgcgttaccaaacgctaataaaataccagctgctggtaaaatcgcaacaggtaacattaatgctttaccgatacgttgcaattgtccaaacaatttcttaaacatataaacatcccctatctcaatttccgcttccatgtacaaaaaaagcaggcatgaacaaacaagactattctcatagtgcggttgtttgctcatgcctgcattaccagtaacacgcaagtgatatctaattcatagctattatacatatttgtaaaagcgttttcaacaactttttcacaattttatcatcaattcagtacgatcatttgtgataaataaacaaaacggcaattcccattttgttgaaatagaaattaccgtttttatagttcaattcaattgtgataacctttaaatcagttataagaaacgttttgctgccactgaaattggtggaatttgatctaaatctaaatgtttatcttcagtaattgatctaaatgcccacttaccataaccaagcgcttcttcatttacaattttacctggtaatggcgcagcattaggatcaacatatacatctacaatcgttggtacatcttgtgctaatgcctcttcgactatagcatctacttcgctagcactcttaattgtataacctttaccacctgctgcctcagcaaattttgcatgatccatatcagaaaaatcaactgcatattctaattcaccagctgcttgttgttcatatttaataaatgctaactgtttgttattaagtacaaatacagttaaaggtaaatcatattgtactgctgtagcgaagtcttgcattaccatttggaatgcaccgtcaccagcaattgcgatggcttgtctatttggatatgcaatttttgatgcaattgcacctggaagaccgcaacccattgtacctaaccaacttgaaatgatgaacttgttatttacaccaaggtttaagtatcgagttgaccaaactgttgctgtacctacatctgctgaaatcactgcatcatctttaataaatttattgattgatgccattaatcgttctggacgtaatggtttactattattatttttatcttgttccatccatttatcccaaaccgctttacgttctaacgttttgtttaagaatggtctttcagcaacatgtttaatattttcagttaactgatgcaacgcaattttactatctccaacaattcctacattaatattgaaacgatgtccgatatttttaggatttgtgtcaatttgaatggctttaatatttttcttaggtaagtaatccacatatggatagtttgtaccaaccataattaataaatccgcttcctgcattgtttgataagatgttttggtaccgattttacctaagttaccgatactatatggatgatcatccggcaagattgttttagctggtaatgaatgaatgacaggaattttagccatttcaataaattcacgtagctcatctttcgcatgtttcgcacctacaccaattaacatgacaggctttttacttttattaattagtttaaccgcttttttgatgtctttatattttggtgatactactgttggtcttgatgtatctactggtttattcgttgtatctttaattttttcagttaataagtcgttaggacaaataacaacagctacacctttttgttcatatgccgtacgaattgcttcgttaacgatttcaaacacattgtcacctttttcaatttggtgattataaacggctacatcttcacataatttttgtaaatttgtttcttggaatgctttcgttccaagtgctgtactattcgtttgtccagataatattaattgcggtacattatccattttggcatcatacataccatttaataaatgaattaaaccagggccaccgatacttaatgccacaccgattttaccagttaattttgtgtaaccagcagccgctaagcttgctacttcttcatgacgtacatgataaaatttaaattgatctctcactgtacgtaaactatcgactactgcgtcgattgagtctcctggaataccatacaagtgatctatatcccatgcttgtaatgctttaactaatgcttcatttgcttttatttttgccattattactaatagcctccctttctgtctatcattttaaatatctaaattaatagaataataaaattagaacaggtattaacactgaactaataactgcagttaaaatcatcccaattgaactaaatgcaccggattcaatatccatttctagtgctttagctgtgccaaatgcatgtgacgcattcccatacgttaatcctttggcgatagaagattcaaatcttccaaatcttaataacatcgaacctaaaatactaccgattaaacccgttgtgataataaaaagtacggtcatcgtatctgtaccacctagttcatgtgacacttcgatacctactgcggctgttatagatcggggcaataacgttacaatgacgtctttagaatagccaaatgctttaagtgttaagaacactaacatgaaattcagcatgacgccagttaatacacttgcaaaaatgatagagacattgtctttaattttctctctatttttataaagtgggtacgctaaacatacgaccgttgcgtttaaaatatggttgatccaactgccacctttcatatacccgttataactaattccaaagataagtaagacaaaaataattcctaaagatgcaattaatgctggattcaaaaatgggttcggatatttttgttgtaaccttttagcgaaataatataaaacgacagtcaacaaaatcattaataaggcttgcacgtaatcattcataagcgtctacacctttacgatgtttatgtttaacagacattttttcagcaatataacctgaagataatgcaacgatacatgttcctatgataatgactgcgaaaaagagtatataatttagcgtaatttcggaagcaacatccataatacctacaactgacggtatgaagaaaaagaccatcgtctttaataaaaagtttgcaccgtcttctacccaagttagcggtacaatcttaaattgtaatagtaaataaaataaaaatagaccaacaatactgccggctaagggaagatgaaaaatcttttgaatttctgtgccaatataagtaatcacaatgatgattcctagttgtagtagtagtttgattattaattggactttgtgcatggcgccatccctttctaaatatgtctaaattgttacaataactattataaagatggcgtacacaatataaaaatactctttttttatagtttgtattactattttctatggaaacgctctctaaatttcacttcattttcacaaaaaaacactcattatttcaatgacccacgtaatgatgcgccttaaataatgagtgctttattaatatgttagcctaaacggtctttcaaaaattctatccatttcgttgtggcatgacttaattgtttatccttcttccaaacaacacctaattcccaatgtacatgagcatcttcaatgcgtagcagcttcacatctccatttagttgctctgaaattgatgttggtaaaatactaatacctaattcattcgtaactaaatcttctataacatgccattgtgaaatttgcgctacagtattcggaacaaagccaacgtttttagcattttcaataattttatcattcaagtaaaagtctttattaaataaaatgaagtcttcacctgctaaatcttcgagtttaacagtttcatattttgcgagtcgatgctctctgctcacgataagtcgcaaatcttccttatctagggtagtataatcgaaaatatgatgatcgactggcaaagtggtcacgcctatatctacttcatcattgataatttgctgttcaattgttttaccgccattttctatcaaattatatgtaacatttggatattgttgatggaatgcaccaagaatattgataagaatcttcatattcatgactgccgacatgcccatgtttatatgtcctgtttccagtccattcaagcgttccatttcagatggtaaataatcatacagtgcaacaatttctttacttttctcataaaaaatttgacctgcatcggtaagaattaaatgtcttttacttctatcaaataagggcgtgcccatttcattttcaatatctttaattgctttactaattgtaggttgtgcaatatataatgatttggaagcattagtcatgcctccttgcttaacgacttcaataaaatatttcatatgtttgatatccactaacatcatcctaactatttcaacacgtttatttcattatacacaacttcttaaacattcaataaatttagatttataaaattgctttataaaaagttttatgtaaaatacacattcttttatggtattatattaatggctcaagtatattaatcgaggtgaggtattgagcttttacgaatttatgcaaagttttcttggtgatgacacaccattaggtgaattggttgattggattaatcaagatagcaatttccctagagaagtgaagagccatagtgaaatattgtcatattttcgaacaaatccatgtcctgaaagcatctcagtacctgtaattaaacgggcactatcagttttcaaccaattcacaaatgtacaatgatacatgaatacatggagtcacatcatctcatgttagcgctctgattgcagggcgctatttttaatgttattgctacatttagtatattgtgattgctattttctttcagttatagaaccacgtaccttttcttttaaatcattttatattttcccactaatatccgctgttaatcaatcctgacatccttgtatcactatgacaattaattgttaaatacatgaatttctacattttatgaaaaaatccatttttattacaattcaacactttatatgacaacttcattacagttacttttattgttgattgcttacattgttttctaaaaaaaatttgttatcataattaacgttgaataaagaaaaaaattaacttgggagataaaaatggaatataaaaagatactaattcgtttattaattgcttttgcagtacttttctcagcagatttcacttatcaatccgtcgaacaaacgcatcaatcgcatgccgcagttaattattatagtaaaaaccaatgtacatggtgggcatttaaacgtcgcgcacaagtcggtaaacctgtttctaatagatggggcaatgctaaaaattggtattacaatgcacgtaaatcaaaatatgcgactggtcgtacaccaagaaaatttgctgtcatgcaatcaactgcaggatattatggacatgtcgcagttgttgaacaagtatataaaaacggtagtattaaagtttcagaatacaacttttatcgcccattaaaatacaatacacgtgtactaagcaaaaaggcagcacgtaactttaactatatttactaatcaaaaaacttctatcacgaacgcttcaatttcctgtatgcgtgtgatagaagtttttattttatgaaattatattattacttctacaaatttcaaattgccgtaattgaacgtatatttcttcttcaactattatttcatctttagcataatctatatataaaattttatgctattatttaaataattcgctataacttaacatacgttttcgatataaaccttgttctaaatctcaataattttttgctgttttcatcgtcattagttaaaaaaataatttaactgagtttttgagacctgtttaaattgatgactcaaaacctttatccccttttcactcggtttaattgctttaatatttaacacagtctcattgtaattttgctactaagtttgaaatatttcgattcgaatgtgaaacatcatttattattactttcgacagctagaaaaatattgttaaaccaaaactataattaccacttttatatagaactatatataaattttaactttgagacagaactgctagtcaggtttatgaatatatttctttagtttacttgatatacttattggtaaatcattatttatttgaagagcatttataacaaaaagtataatcccagttatagcgattccatgaccatttttatcagtcaaagattcatcaacaaaaactttttgataaatttatatatttgtataatttattatggtagatatctacacccgtatctataacagctacagttatcattgcgtcttatccaaatagtttttaagaaataaatataattcattaatatcatggctatttgtaacgtcagtgcttaagaccttgtcaattattgttttatctgtttctaagagcccctgattttctgcatacatattttgtatatcgctgttaatctcatttaattttttaaatttttttctaacctttttcaaaataaaatgctctttaattccatctcttaaatacatataaatctctattataatctccataaatgtcatatctcctctctcaaaaaacattatactcaatatattaaaaataagaaaggttttttcagaatttttagtattttcagatatttattcttaagtatcttattattacttctttttaacgctagtggaataattaataataattgtatttaaatgcaatgctgttgttctttcatacttacaagcaagtcataagaaatgagaaattaaattcttatatgatgaataaatgatgactgcagaagaaattgctaaaaaaggagtggagtgaggcattctactgttcatattgttaacaaatatcaaaatgataggaacttgaagaatctaagactgttaaaatcgagacaagaagaaactcgttccaaatttgaatcctataatgaattcgtctcatgaagaagttatttacttttcattagactgatttactaatcaaaaaacttctatcacgaacgcttcaatttcctgtatgcgtgtgatagaagtttttatttttgttcatattaatttatctaagcgctacgatggactgacttaaacttttctttaaaatcgctattcgccatttactattgttgtctaatttcttgtaaaatatgttccgctgcttgtgtatttgcacggggttcttttttcaaagcttcagctactttagcaatttcatcaccttttgcccctacaacgatagctaatgatttatattgtaaactcatatgaccttgttgaataccttctgacacaagcgcgcgacatgctgcaaagttttgcgctaaaccaacggcagcaactacatgacctaattcttgtgctgactctacatttagtagctctaatgaagctttagcaattggtaatacttttgtaccaccgccaacgattgccaatgtcataggcacttcaattgtaccaatcaatcgttgacgatcttgatcgtaacgccatgtagcaataccacgatactgtccgtcacgactcgcgtatgcatgcgcacttgcttctgcaccacgcgtatcatttcctgttgctaaaacaacagcatgtatgccattcataacacctttattatgtgttgctgcacgatgaatatctacttgggccaatacagaagcacgttccattcgtttggcaacctcttctccagttctctcgccccttgctaaatctttaacatcaatttcgccttgaactttaacaacggacgctgttgcatgattggataaaatactcattaaaatgtcgctttgcggaaattcattttttaaaaatgcagttatggcctctaaaatcgtattaagcatattagcgcccatagcatctttcgtatcaacaaatacttttaaagatagtaactgttgctcaggaaatgtatcaatcgctatacgttggtaaccaccaccacgcgctttaatagaaggatatgcctcatccgcaattttatgaatttgcttttctaaagctttaatgtctgctgataatttttcagtatcgtcaacgccatcaaagacgatttgacctatcataatacgttcagaagataccgttttaaatccgccagtctgattcactagctttgcaccataactagctgcagcgacaactgaaggctcttccaccatcataggtacaacatatgccttatcgtccacaatgatattcggtaataatccaacgggtaatgcaccttgcgcgatgacattttcaattaaactattggctacttcttcatcgattaatggatgattcagtaaaatgtcgaattgttcttctgataaccattgcttatcaaccaattgttgtaacttttctttacgagataaatgtcgaaaattcttatctaaattttgcatggacgtactccttttacttcacataatttttaacatttcaatcactactatttttaccacaaaataacgtcattcgtcttaaaattcaattgaataattgtcgttttgactttaaaataaaacaaggtaaattaaaacgcttacaagaaacgacaaatcatttttaaatttagtatatttctttgtataaaattagcatattctgatatgatacaagtgttgcttttataaatttgaaaggatgtaaaaccttatgacaataggtatcgataaaataaacttttacgttccaaagtactatgtagacatggctaaattagcagaagcacgccaagtagacccaaacaaatttttaattggaattggtcaaactgaaatggctgttagtcctgtaaaccaagacatcgtttcaatgggcgctaacgctgctaaggacattataacagacgaagacaaaaagaaaattggtatggtaattgtggcaactgaatcagcagttgatgctgctaaagcagccgctgttcaaattcacaacttattaggtattcaaccttttgcacgctgctttgaaatgaaagaagcttgttatgctgcaacaccagcaattcaattagctaaagattatttagcaactagaccgaatgaaaaagtattagttattgctacagatacagcacgttatgaattgaattcaggcggcgagccaacacaaggtgctggcgcagttgcgatggttattgcacataatccaagcattttggcattaaatgaagatgctgttgcttacactgaagacgtttatgatttctggcgtccaactggacataaatatccattagttgatggtgcattatctaaagatgcttatatccgctcattccaacaaagctggaatgaatacgcaaaacgtcaaggtaagtcgctagctgacttcgcatctctatgcttccatgttccatttacaaaaatgggtaaaaaggcattagagtcaatcattgataacgctgatgaaacaactcaagagcgtttacgttcaggatatgaagatgctgtagattataaccgttatgtcggtaatatttatactggatcattatatttaagcctaatatcattacttgaaaatcgagatttacaagctggtgaaacaatcggtttattcagttatggctcaggttcagttggtgaattttatagtgcgacattagttgaaggctacaaagatcatttagatcaagctgcacataaagcattattaaataaccgtactgaagtatctgttgatgcatatgaaacattcttcaaacgttttgatgacgttgaatttgacgaagaacaagatgctgttcatgaagatcgtcatattttctacttatcaaatattgaaaataacgttcgtgaatatcacagaccagagtagtcggtgtatttaaaacacatataataaaacctaaaagcagcagtaagaccacttctaattgaaatcgtcttactgctgttctctatttataacacttcgtattgaatgaattcattatgcctatttgacacattattgaagttttcctaatgcctggatcctttatacgttacggcttcgtgctatgttttggtacataaagctttgacatatcgatattctccaactctaacagcttaattttattattaatcgttccaccgaaccctgttaagctacccgttttaccgacaacacgatgacatggcacgataatagataatggattacttccgactgcacctccaaccgcttgggctgacatttttggcttgttaagcagcttgcctacttttttggcaatagcaccatacgttgttagagtcccataaggaacctgtcttaattcattccaaacacactgttgaaaatgactacctgttggctttaaaggtattgtgatttcaggattgtcacctttaaaatacgcgtctaaccactgtgtcgcctctctaaatatcgctaaagacgtattttcttccctagtaccatcaccttgttgattttcaaacaaaacagcggtcagacttaccccatcactcaaaagttccaatcgtcctacaggcgaatcatagtaactcttatactccataaaaattccccctttttctaatcatacgccttaattgttaaattagaaaatattcatgttcacattttttaaaaataaataagtcgtcaattacgtatataaacacgtaataccagctatcactttgctgcaatatacagttacatatcttactacacgtgctaacctcttactttgtaaaccaaatcttaaattaaaatattgaaaatgcaatgaatccttaatattttattaaacctataattacttattaaaaataacacacaatattcataaagttttaaaaatattctgttttatcacctactattagtggaaaagtacaattgcaattgtatatagtttgcataacgcttcaaaagtaatttcttttttgtttagttcaaaaaaatttagaggtgatgttatatgaataacggttttttcaatagcgactttgattcaatttttcgaagaatgatgaaagatatgcaaggttcaaatcaagtcggaaacaaaaagtactatattaatggtaaagaagtttcacctgaagaactagcgcaactcacacaacaaggtggcaatcactctgctgaacaaagtgcgcaagcttttcaacaagcagcacaaagacaacaagggcaacaaggtggcaacggcaattatttagaacaaattggtcgtaaccttacgcaagaagcacgtgacggtttattagatccagtcattggtcgtgataaagaaattcaagaaactgctgaagttttaagtagacgaactaaaaacaatcctatattagttggagaagctggtgttggtaaaactgcgattgttgaaggtttagcacaggcaatcgttgaaggaaatgtaccagcagcaatcaaagacaaagaaattatttctgtagacatttcatcattagaagctggaacgcaatatcgtggtgcttttgaagaaaatattcaaaaattaatcgaaggtgttaaatcttcacaaaatgccgtactattctttgatgaaatccatcaaattatcggttcaggtgccacaggaagtgattcaggtagcaaagggttatctgatattttgaaacctgcattaagtcgtggtgagatttctattattggtgcaacaacacaagatgaatatcgaaacaatattcttaaagatgctgcattaacgcgcagatttaatgaagtgcttgttaatgaaccaagcgctaaagatactgttgaaattttaaaaggtattcgcgaaaaattcgaagaacaccatcaagtaaaattaccagatgacgtattaaaagcatgtgttgacttatcaattcaatatattccacaacgattattaccagataaagcaatcgatgtgttagatattacagcagcacatttatctgcgcaaagtccagctgtcgataaagttgaaactgaaaaacgaatttctgaattagaaaatgataaacgtaaagcagtaagtgctgaagaatataaaaaagctgacgacattcaaaatgaaatcaaatcattacaagataaattagaaaatagtaatggtgaacatactgctgttgctacagttcatgatatttcagatactattcaacgattaactggtattccagtttctcaaatggatgataacgatattgaacgtttaaaaaatatttctaatcgtttaagaagtaaaatcataggtcaagatcaagctgtagaaatggtttcacgtgcaattcgccgtaatcgtgctgggtttgatgacggcaaccgtccaattggcagtttcctatttgttggccctactggtgttggtaaaacagagcttgctaaacaattagcaattgatttatttggtaataaagatgcactgattcgacttgatatgagtgaatatagtgacacaacagctgtttcaaaaatgattggtacaactgctggttatgttggttatgatgacaattcaaatacgttaactgaaaaagtacgccgtaatccatactcagtcattctatttgatgaaatcgaaaaagcaaatccacaaattttaacattgttattacaagtaatggatgatggtaatttgactgatggtcaaggtaatgtcatcaactttaaaaatacaattattatttgtacatcaaatgctggctttggcaatggcaatgacgctgaagaaaaagatattatgcacgaaatgaaaaaattcttccgccctgaattccttaaccgcttcaacggcatcgttgaattcttacatttagataaagatgcattgcaagatatcgtcaacttattattagacgatgtacaagttacattagacaaaaaaggtattacgatggacgtttctcaagatgcgaaagattggttaattgaagaaggctatgatgaagaattaggtgcacgtccattaagacgtattgttgaacagcaagtacgtgacaaaattacagattactatttagatcatacagacgttaaacatgtggatatagatgttgaggataacgaattagtcgtaaaaggtaaataacgacactttaacatatcgcgcatcaaaaatgagcatcaggtcgcccttgcctgtgctcatttttttaattatttccctggaaaatgattcgctgtgtgctgttctgttccacaacaatcacgattaatgtcacatgtaccacattttccttgttttgaacgcttgaaaaattttactagtgtatataaggcatatccgaaaattgctaaaaaaattaaaatgttaataatgactgacactttaaccactccttaaacaaataaatgtccgacttgataaaaaatgaatgttaagacatatgcagtgactagaggataggcaactgcaagtgccgtccatttccatgaataagtctctttacggattgctgctactgtagaaacacaaggaatatacaatagtataaatatcataaatgcatacgcagatagcggtgtgaattgattttgaatcacattaacaaggcctgcatcacctgatgaatagataatcgccatcgaacttacgataacttcttttgctaaaaatcctggcactaacgtagcacctgcttgccatgttccaaatccgagcggttgcactaacataccaaagaaactaccaaccatatgtaaaaaactttgattgatattcacattgataccatgtggtcctacataacttaatagccaaatgactactgagccgccaaaaataaatgtacctgctttacgaacaaagcccttagccttttcccaagtactacgccacaacgttttaatggaaggcacacggtatgttggcaattccacaataaagattgcattatcattttttaaaatcgtcttagtaagtactgtactgactaaaaatgccataataatacctaaaacatacaggcttaatactactaaagattgattctctttgaaaaagatacctacgaacaacgcatacactggcagtctagcagagcatgacatgaatggtgcaattaatatcgttgttaaacgctctttttcattttcaatactgcgcgcagccataatactcggtacattacaaccaaatccgataatcattggtataaaagacttcccgcttaaaccgaacgattccataatacgatccattaaaaccgcaatacgtgccatataacccgaatcttctaataaagatataaagaaaaagagcacaacaatttgtggtacaaagactaatactgatcctacaccagcaataatgccatctgtaattaaatcttgtaaaaatggtataacaccaagataattcataatcgtcttcacactatctgtaaatgtaccacctataaatgcatcgagttgatccgacaaaggtgtgccaatccatgtaaatgtagtttgaaagatcaaccacataattgctagaaagataggcatccctatatatttatgtgttaatatcttgtctattctagagctgaaatattgcttatcttcatctggatacgttaccacgtcttgcaataacgtctcaatataatgattgcgtatacgctccatctctcgacgaacagatacagcccctacttgttcagcaacttgatcacgtaaactcgacaatttatttacaacctctgaattaagttcgtttgcaatttgcatgttatttaataagaattgaatcgcaataaacctagcttgatacttatcatgagatgtctctgtcattattatttgacacatatttttaattgtctcttcaatcttctcaccataattgattttaaaatgcggttgatacccttcccctagatgctttatttcgccaagtaaatattttgttcctttgcctgtacgtgccacaactggaaaaataggtgtttttaactttttcatcaatttatgataatcgatttttatcccgcgctttgtagctacatcaatcatatttaatccgatgtatattggttgattaagttctaacaattgtactgttaattgcatatttctttttagttgactcgcatcaacaatgttaatgattcctgaaaatgaatcgtttaataaatagtctgtcactacagtttcatctttagaaatcggcgataaatcatatgtacctggtaaatcaattaattgtcctacattttctttaagtttccctacttttttctctaccgttacgccactccagttgcctatatattcatacgaaccagttaaagcgttaaacaaagatgttttaccaacattaggatttcctaaaatacaataattttccattcgtccggctcctattcttctaatgcaatagaacaagcatcgcaatgtctaatacttaactgttgtccgtttacttcaataatacatggccctttaaataaacatttttgtttaatcgttatgatagcgtcatctgttaacccaaaggcacttagacgatacaacatattctcattagcaatatccattcgctttattttataagccttattcatttcaccatttttaatgtttaacatactatttcgctctcctattagaaataataatcattatcacttaaaaatcataacccttaaaattgtagctcgcaatactttatttaaataattttcatttttcatgtaaaatttgtgacattgcaaaaatgttttgtataatcacttccatgcaaaaaacctccgcttcaaatgtcattgatagacatttaaagcggaggcatgtacatgttattttatgatttatttcgtagatttttttctaacaattgattgagcttttcaatatttttattcaactgttctatattcgttgcttgttgttttgaatttagttgatgcttgttttgataatctattaaagcatcatataagaacaatgaacttgctgattgctgtttcacttcttggtacaatgccatcgttttatcatctagtactattgaatgtgcatcatcttgcccatgtgcatcttgatgtttcgatacatttgttgcaccttgtggatatactttaaaggttgtgtcgtatgtttccttactatctttagcttcagattcctgtgattcaaccgttttatatttttcaagtgcatgtccttcaatatcaactcgtggaataatgcgattcaaccatgctggtaaataccacgaaccttttccaaacaatttcgttaatgcaggaattaacatcattctgactacgaaggcatcaaagagtacaccaaacgctaatgccatacccattgatttaatcatgacatcttcttggaatacaaacgcaaagaagacactaaacataattaatgcagctgctacaataacaggaccgctttctttcaatcctactttgatagaataatcattatcccctgttttactatattcttcatgaattcgcgacataaggaagacttcataatccatcgctaatccaaataagatacctatagtaataaccggtaaaaatgctagcattggtcctgtcgtttcaataccaaacagacctttcataaaaccatcttgcattactaatgttgtaaatcctaatgttgccattaatgacaagacgaatcctaaaactgcttttaatggtattagaattgaacggaagacaatcattaataagaaaaatgctaatacaacaatgactgaggcaaataaaggtatcgcctcatttaactttttagacatatcaatattaatgacactttgtcccgaaatctccgttttgaacccatatttatcttgtgcatctttatgataatctcgtaaatcatgcactaaatcatttgtactctctgcattaggcccttgcttaggtatcacgaccatcaaagcgtaatcattatctttactcatttgtggtggcgtaacgatatctacatttttcttatctttaatatctttatatacagactgtaaatcttgttgtaatccttgtggatcatcctttttatctttcacatttatcaacatcggtatttggccattaaatccttcaccaaatttatccgagataatatcgtaagcttttttctgtgtagaatctgctggtttaacaccgtcatctggaataccaagtcgcatatgactaactggtattgcagctgctactaatatgattaaacctagtaatactgccgcaagtgcatttcctgtaataaatttagaccatggcgtatcaatatcttttttgaatttagactgtaatttattcactttaatgcgtttatggaaaatgcttattaatgcaggtaataaagttaaagcgctaagtactgcaaaaacaacactaattgccgaagcaaatcccattaccgctaagaagtcaatgcctactaatgataaaccacatactgcaattacaactgttacaccagcaaaaacaactgcactacctgctgttcctattgcaagaccaatgcctttaatgtaatctgtttcagttttcataacttgtcgatatctgaataaaataaataatgcataatcgataccaactgctagtccaatcattacggctaatgtcagtgtgacatttggtatatcgaatgcataagttaacaaactgataatacctacaccagaggctagaccaatcaatgcacttataattggtaatcctgcagcaatgactgaaccgaatgtgattaacagtacaacaaatgcaacaataataccaactagttcagaattaccgcctacttctgtagatgtcattcctgtaccagttaactctgtttgtacattatgattgtcacgtaagtctttcaaatgacttttaacattatctctagagccatcttttaaagatgtttgactaacgtcatatgtgatatctgcaaatgcagttgttttatctttactaatttgcttattttcataaggatctgatattttatcaatgtgcttgtcatcttttttaatatcatctaacgttttcttaatatctttagtaatgttcggttgcacaataccatcatctttagtcgtcttaaagacaacacgtatttgtgccttttcactatcttgattaaaatgtttttcaatctttttattcgtatctaacgactctaatcctgtcattttaatatcattgtcaaatttcggtgcatttgtagcaagtggtatcaatattgcagctacaatcactatccatgcaatgaccgcggaccatttatgttttgcgatgaatgtccccatcttatataaaaattttgccaaagtatattgcctccttttaaaatcaacgttatagtttaaatatacagtgtagattattgttcgattatagtatctatccccgacctcttaaagaatcaattggaaaattttgtatattaaactacacacaaaggagaaatgtagatgaaagagactgatttacgagttataaagacaaaaaaagcattgtcgagtagcttgctacaattgttagaacagcaattattccaaacgattactgtcaatcaaatttgcgacaacgcactcgtacaccgtacaacattttataaacatttttatgataaatatgatcttctagagtacttgttcaatcaattgactaaagactactttgctagagatatcagtgaccgtcttaatcatccattccaaacgatgagtgatacgattaataataaagaggatttgagagaaatcgcagaattccaagaagaagacgctgaatttaataaagtattaaaaaatgtctgcattaaaattatgcataacgatatcaaaaataatagagaccgtatcgatattgacagcgacatcccagataatctcatattttatatttatgactcgttgattgaaggttttatacattggataaaagatgaaaaaattgattggcctggcgaagatattgataacattttccatagattaatcaatattaagattaaatagtagatgagaaactcatgagcgttaccaacattcataataaaaacgatagtgtacacgttaatgaattcgtgtactactatcgttttttatttttatcgtgcttatcgctattaaaacaactgatacacaacacataaactatgaagaaaaaaataaatccgctatctaaatgactttgactcagttgtttaaatgaccaaattgctaatacaattcccattattattgaaataacgtatctcacattcttatacctataatccttttctaaaaatatggttgctattacttaatttttaaagttataaataaaaagagccaaccgcaatggatggcccttgttcattatgaagcattagaacatttctgaaacaaccttttgttctaagaagtgtaataagtagtctggactacctgttttagcgtccgtacctgacattttgaaaccaccaaatggatggtatccaacaactgctgaagtacagcctctgttaaggtataaattgcctacatcaaattcgtttaccgctttaatccaatgctcgcgattatttgtaatcactgcaccagttaaaccgtaatctgtatcatttgcaacctcaattgcttcatcaaaatcgttaactttcacaaagccaacaactggaccaaaaatttcttcttgcatgattctatctttagatttaagtcctgaaatgattgttggttctacaaagtaaccttttgaatcatcagtgccgccaccttgttctaatttaccttcttctttaccaatctcaatataatttttaatcttatcaaattgttttttattaataactgggcccatatacgtattgtctacagtattgcccaacgttaattcttttgttaatttgattgatttctctaatacttcgtcataaacgtctttatgcacaattgcacgtgaacatgctgaacatttttgaccagaaaaaccaaatgctgacgttacaatagcttctgctgccatatctgtatcaatattttcatcaactacaatggcatctttaccacccatttcagcgataacacgtttcaagaagttttgaccttcttgaacaacggcactacgttcataaattctagtacctgtcgcacgtgatcctgtaaatgtaacgaaatgcgtatctttatgatcaactaagtaatcaccaatttctttcggatcaccaggaacaaagttaactacgccttttggtaatcctgcttcttctaaaatttccattaatttataagcgatataaggtgtatcctcagcaggtttcaataacactgtattacctgccacaactggtgctaaagttgtaccagccataatcgcaaacgggaagttccacggcggaattgtaacacctgtaccaattgatttatagaaatatttattgtgttcaccttcacgatcaagtactggcttaccttgagccaagtccatcattgaacgtgcatagtattcaataaaatcaataccttcagctgcatcaccaactgcttcatcccatggcttacctgcttcataaaccataattgctgcaatttccgcttttcgacgacgaataattgccgaaacacgtaacataagctctgcacgatcatttgctgaccatgttttccaagatttataagcttcgtttgctgctttaaacgcatcttcaacatcttgttttgttgcctttgatgcatttgcaatcacttgtgatgtgtctgcaggattgattgatttaattttgtcatctttgaaaatcttctctccattaatcactaatggtatgtcttgacctaattctttttccacgtctttcaatgctttcttaaacatatccacattttcttggactgaaaaatcgtaaccaggttcatttttaaattctactaccatgtacacttaccccctataaattttgaaagtggtttaaccctttgatttaatgatataacatcatttaaactcattttactatgattaaggttagttttgcaatcgctttcatttttatgttttatcacttattctcaagtattttgaaattgattggttactttttaaaatttatatgggtcgcaactgctactttatcgtttcgtcatttaatgtttcggatggtaggtcattatcaattttacgaacgactttacaagggtttccaaccgctaagctgtgtggcggaatatctttagtgacaacactaccagcaccaatcacactgccttctccaatcgtcacccctggtaacacggctacatgaccgccaaaccaagtattactgccaatatgaatgggtccggctttttcaaaaccttcatttctatgatggaaattaagtggatgtgtcgctgtgtagaatccacaattaggtcctataaaaacattatcgccaattgtaatctgtccaccatccataaagtaacaattggtgtttacatagacattttttcctagtttaacgttccaaccataatctgtatcaaaaggaatcgaaatacttacattgtctgttgttgtttgaaataattgatcaattaattcctttcttttatttgtagcactcggtcttgtatgatttaattcaaagcaaatatctttcgctcgtgcacgttcattgattaagtattgatcaaagtttgcatcgtaccatttttctgctaacattttttctttttcagtcattacacctttcaactcctaataacttatttacttgtttaaaagttaatcaaataaaccttcgcctatgcaactaatacgctataacattatgaaatcatgaccttatcacccttatctatacaattctcgcatcaaatactgctaaagtagtagataaattcaatactacagacgcattcattttttaatctattaacgtacaatgtgagtaagagaaatataaaggagtatgatagcgatgagaatattaattacaggcacagttgctatcttaatcattctaggtttggtcaaaacgatacaagattacgaaatgacaaacgacacgagtcgtcagttgtcagacaacaaagatgatgataaagtcatccatcttaataattttaaaaatttacatgcgaaagaatttaacccatctgatttcttttaagtcacctaagaattgcaaatccagaagtcatttaagttttacctttcattcatacatcctttaatattaattacgacttcttttatatagatgctaagtagagagattgttgtgcaatgtttgcacggcaatctctctttttctttttaaaattggtaaaagtaaaacgcaacgattgacttatatacctatagggggtacattagacgtgtaacaatgaatcacagggaggcaataatgtggctaatacgaaaaaaacaacattagatatcactggtatgacttgtgccgcatgttcaaatcgtatcgaaaagaaactgaataaacttgatgacgttaatgcccaagtgaatttaactacagagaaagcaactgttgagtataaccctgatcaacatgatgtccaagaatttattaatacgattcaacatttaggttacggtgtcgctgtagaaactgtcgaattagacattacaggtatgacttgtgctgcatgctcaagccgtattgaaaaagtgttaaataaaatggacggcgttcaaaatgcaacggtcaatttaacaacagagcaagctaaagttgactattatcctgaagaaacagatgctgataaacttgtcactcgcattcaaaaattaggttatgacgcgtctattaaagataacaataaagatcaaacgtcacgcaaagctgaagcgctacaacataaattgattaagcttatcatatcagcagtattatctttaccactattaatgttaatgtttgtacatcttttcaatatgcatataccagcactatttacgaatccatggttccaatttattttagctacacctgtacaatttattattggatggcaattttatgtaggtgcttataaaaacttaagaaatggtggcgccaatatggatgtacttgttgctgttggtacaagtgcagcatatttttacagtatttatgaaatggttcgttggctaaatggctcaacaacgcaaccgcatttatactttgaaacaagcgccgtactaattaccttaatcttattcggtaagtatttagaagctagagcgaagtctcaaacaaccaatgcgcttggcgaattattaagtttacaagctaaagaagcacgcattttaaaagatggtaatgaagtgatgattcctctaaatgaagtacatgttggagatacacttatcgttaaaccaggtgaaaagatacctgttgatggcaaaattattaaaggtatgactgccatcgacgaatctatgttaacaggtgaatctatccctgttgagaagaatgttgatgatactgtaattggttcaacgatgaacaaaaacggtactattactatgacagcaacaaaagttggcggggacactgcgttggcaaatattattaaagttgtcgaagaagctcaaagttctaaagcgccgattcaacgattggcagatattatttctggttatttcgttcctatcgttgttggtatcgcactattaacatttatcgtgtggattactttagttacaccaggtacatttgaacctgcacttgttgcgagtatttccgttctcgtcattgcttgtccatgcgcattgggacttgctacaccaacttctattatggtaggtactggtcgcgctgctgaaaatggtattttatttaaaggtggcgagtttgttgaacgcacacatcaaattgataccatcgttttagataagacgggtaccattacaaatggtcgtccagtcgtgacagattatcatggtgacaatcaaacgctacaactacttgctactgctgaaaaagattctgaacacccattggcagaagccattgtcaattatgcaaaagaaaagcaattaatattaactgagacaacaacatttaaagcagtacctggccatggtattgaagcaacgattgatcatcaccatatattggttggtaaccgtaaattaatggctgacaatgatattagcttgcctaagcatatttctgatgatttaacacattatgaacgagatggtaaaactgctatgctcattgctgttaattattcattaactggtatcatcgcagtggcagatactgtcaaagatcatgccaaagatgctataaaacaattgcatgatatgggcattgaagttgccatgttaactggcgataataaaaacactgctcaagccattgcaaaacaagtaggcatagatactgttattgcagatattttaccagaagaaaaagctgcacaaattgcgaaactacagcaacaaggtaagaaggttgcgatggttggtgacggtgtaaatgatgcacctgcattagttaaagctgatatcggtatcgccattggtacaggtacagaagttgccattgaagcagctgatattactattcttggtggcgacttgatgcttattcctaaagccatttatgcaagtaaagcaaccattcgtaatattcgtcaaaatctattttgggcattcggctataatattgccggtatccctatagctgcattgggcttacttgcgccatgggttgctggtgctgcaatggcactaagttcagtaagtgttgtcacaaacgcacttagattgaaaaagatgcgattagaaccacgccgtaaagatgcctagattccttaataatgaaggattcgttggtgattctgagataggctagtgattggctctataatgtcgcggtttacagttggatcttcgctccaactgcatatatagttacacttttcgcttggcgaattagtgtatcttacctaatagctccgcctattaggttccatcattattataaataataagtacactacggtttacagttggatcttcgctccaactgcataagagccactaattattataaataataagtggctctaaaaggaggtgaatgctatgtcacaagaaattttaaatgttgaaggtatgagctgtggtcactgcaaaagtgctgttgaatctgcattaaataatattgacggtgtcacttcagctgacgttaaccttgaaaatggtcaagtaagtgttcaatatgatgacagtaaagttgctgtatctcaaatgaaagacgcaattgaagatcaaggttacgatgtcgtttaattaggcaatattcaacgtcatcaacaccaaattaaaaaatcgaactgatgagaatcccaacaatccaaattatctcatcagttcgatttttaatttactcgtaacctagtatctccagtctgcaatacatctaatgttgcatctaatgcatcgacaattagatttttaactgcagcttcagtataaaacgcaatatgtggtgttaatatgacatcttccctgtcaatcaacgattctaacaatggatcgttcagtgttttgcccctttgatcacttgggaaaagtttgcgttcaaattcatacgtatcaagtgctgcacctttaatcacaccattgtctaatgcgtctaataacgccttagtatctactaaagaacctctcgcacaattgacaaatactgcgccctttttaaaatgtttaaataattcagcattaaatagataatgattatatttcgttgcaggtacatgtaatgtcacgatatcagcaccttcaaccgcttcctcaatcgtatctttgtaatcgacatacgttgcaattttagcattaggaaacgggtcgtatgcgaccacatcactttgataaccattggcaaatatatcggctactacacggccaattcgacctgtaccaataacagctacttttaaatctttaatggatttcgataaaatagtaggttcccatctaaaatcatgctcccgcactttcgtttgaatttgattaaaatgacgaaccacattaatagcctggttcacagcaaactccgcaattgaattcggagagtatgacggcacatttgacacaataaagttatacttgtttgctaactccaaatcatatgtatcaaatccagcactacgttgtgcgatttgtttaatacctagttcatttaatcgtttataaacatgctctgataatggtatttgttgtgatagcgataagccatcataaccagcgacaccttcaacattgtcatcagttaatgcttctttagtaatatctacctcaacatgatgtttctctgcccacgccttgatataaggcatatcttcatcacgtacactcatgattttaatttttgtcattttaacatcacccttaactttattattcatataaatatgctagttctgttaatcttattgcagcttcgtctaatttctggtcatctaacgccaatgaaattctcacataacgattaccattctctccaaatggtttccctggagcaacaagtattgacttctcttgcactaaaaattgctcaaattgctcgctgtcataaccaggcggtgtttccaaccatacatatatgccacctttagcatgaacaaatggcaaatcagcttttgcaagcatggcttcgaatcggtcacgacgtgttttaaatacattgctttgttcttctaaaaaatcatcataatgattcaaagcatatattgcggcatcttgtaatgcaccaaacatcccagcatttgtgtgcgtttggtactttttcaaagcttgaatcatatctttattaccaactgcaaaaccgactctaaaacctgacatgttataacctttagacaaggaataaatttcaatcgcaacatctttcccattttccgaagcaagtatactaggatttttagcgtcgaaaccgaaagcaccataagcaaaatcatgcacgattttagtgtctgtacctttaaatttagctatcgcttcatcaaaaacttctttcgtagctgtcgatccagttggattatttggatacgttaaataaatgagttttgttttatctattatttgtgaatcaactttggaccaatctggcaaataatgtggcggttctaaattaagcgggactggcttgccatcagctaaaagtacacctgctaaataatccgtgtagcctggatcaggtagtaatacatagtctcctggattgataacacatgttggtactgccactaatccattttttgtaccatataaaatgcatacttcatcttctttatctaacgtcacattatattgtctttgataaaaatctacaatagcttgcttgaacgcttctttaccatgaaaagcaccatatttttgattttcaggaatagttagtgctttttgaaaatgatcaataataccttgtggcgtgggcccatcagggattccaactgccatattaattaatggcaatggtccatgttcgattttacgtcccatcgttttcccgaaataactatcagggatatttgctaatttgttagagatcatcaaattcctcctctatcattaaacatagcctgggcgactatcataatcctaacaacttgtatcactctcatttagatggttacaatgacatcgccattcaccgttatgttcaacagaacttatgacacacgttgtattgaatgaatttattttcattttaggtaggtataatattattgtcaatattaggaattttcagattaatatgcactcaatcgttatgatttaactgtcatgcatatccgcatgcgcaaccagttagatatgcttatataaagtataacgcccatcaaggtacgtattcaaacgtgaaccttaacaggcgtcattcattgttaaataaaacttcttaagcacatacttatttcactatgccttttacgttccccttatacttttctcacatctttctcttagactactcccttatacgccccgctcaatatctttaatcatttcatctacagttattttcgcactcgttaagacaataggaacgcctgcacctggatgcgtacttgcacctgcaaaatataaatctttataatctcgcgatacattttgtggacgataataattactttgcgctaaagttggcattaaaccgaatgccgaaccaaatttcgcatgatacgtttgctcaaaatcatttggcgtaaagattgtttctgaaacaatatgcgattttatatcttcaaatacttcaatcgttgctaatttacgataaataatttcctttatttgttgcgtcaaagcttcatctgaccaatcgattccgctacctgttttaagttccggcgtcggcattagcacataaataccagttttgccttctggcgcaagtgatttatcagcgaccgctggtacatacacataaatagaaggatcatatgataaacgtccctcaaatatttcttcaatattgcctctaaagtcatctgaaaaaataacattatgaagtctcacttgatctgtcacatcaatatctataccgatatacattaaaaatgctgaacaagagtaatctaagtctgcaattttatgtggtggatactttttaataggtgcaaaatctggcattaatgattccgcaacactagggaaatcagccgtacataaaattttatcaaattttcttatgtcaccattcacttttatcgcatcggcccgtttgaatttaggatcaataataatttgctcaatttcagcatttagttcaatattaacgcctaagtctttatttaattgcgctagcccttgagccatgccatacataccgcctttaataaaatgcacaccaaacatcatttcaatcataggaataattgaatatagtgacgggcctcgttttggatcaattcctatgtataacgtttgaaacgctaaaagcttttgtatcttttcgttatcaatataatgttcaattagctgatctgcatgatttaacgtttttaacttagcaccttgcacaagtgacgtcatattataaaagtcactcggtttgcgatacgttctttctaagaaatagcgacgtgcaatttcatattttttataaacatccgttaaaaaggacataaaaccatgcgttgaaccaggttctatactttctagcatttgctgtaattcagctaaatctgtaggcaccgttatacgatcatcgtggtcaaaatacacatcgtaaatataacgtaattgtctcaattcaatataatcttcataatttttaccacacgctgtaaaaacatctttataaacatctggcatcatgacaattgtgggacccatatcaaatgtaaagccgtctttctttaattgattcatacgcccgcctacattattatttttttcaaatatcgtcacttcatgaccttgagaagcaatacgggctgccgctgctaatcctgtgacacctgcaccaattactgcaatcttcattattcaaccacctatattctatgatatttactatttatttcatgaaacaactttgcctttttcctcttatccacaaaaacacgttcatgtaatgtatagttagcctgtctcacttcgtccagtatttcaatatatatacgtgctgctaattctatgattggttgtgcttcaatactaaatactttgatttgatccataacatcttgaaaatctttttctgcgatagctgcataatattcccataagtcaatataatgattattaacaccattttggtacacttcagcaatatcaacttcatattgctttaatcgttgcttactaaaatatatccgttcattgtcaaaatcttcaccgacatctcttaatatattaatcaattgcaacgattcaccaagtcttcttgcgacatcgtatgtctgatgtgtttcatgatcacttaaaatcggcgtcaatacttcacctactgtaccagcaacaccataacaatatccgaataattcagcgtccgtttcaaacattgtaaaatgttgatctttatatacagtatcaatgagattataaaaagattgaaaggcgatatttttatgttgtgcaacatgctgaagcgccatcatgattctacgatcactttgaaagtgatgatgttcatatgggtatttttcaatagattgtatatcttcttttatttgatttaaaaattgaatatcgccataaacatctatactgtcatcaattttacgacacacagcataaattgcccaaaccgcttttctttgatcttctggtaacaagtcaaaagcgtaagaaaagctttttgaatgtttcttcatgattttatgacaatatttaaaattcatatccatcattgtcatactagtcctcctatattgaaatgccattaccttgatttattgttctttagatatagaatattgacgacctttccattcaactacaccataacgatgcgtttgtttccaagattggatgaaaattttagtaaaaaacataaataacaatggatgacataccattaataaattagaaaattggccgacccttcgatgcagataaataaattgtgtagtatagctcaagtaaagtgctaccatttttcttacagacatttggcgatattttaaactaagacatagccctaaaatactcgctatagaaccaaacaaccacaacacaattgctgtcatgatcttaggctttgtgccacctgccccagttgacaaatgctttgtccatccttcttgtaatgactgaaatccttcttgatacatgcgaaatgcaacaaatggaaacccttcataaactgttacgggcaatgattgtgaagtatatgcacttcctaaagcaaatccttcaataatatgacggtttgcacttttatgacctccagttgcataataatcttctttatttgttaatgtcaccggtccaaatgcatgctggttagtccgaccgtcgtctaaggtagaaaatacattcataccaacgactgtcattaaattaaatatcgctgaaaacccttcgtagaaacgctttgttatatgataaggctgtacgcttaacaatcctttttcaccttgtaattgatactgattaatcaacgtttcaacagcatctttccttaagaaagttacatcagcatctacaaaggcaatgcgattcgtacatgcatgcgtcacaccttgataacaagcatgtgatttcccataccatttgccgtcagtatcatcaacaacatctactacagtcgcaccatatgaacgtgctacacgtgctgtttcatctgtcgatccgtcattcataacaatgacatctactggaacttgctgttgtattatcgaatgtagtaaatgacctattcttttttcttcgtttctagccggaataataattgttaatgctttatgattgaagttcagcgttttcgcctttagctgatgtctacgattaaatatcaatgcaccacacgccatagacatggtcactattactgttaatattcgtgataaccatttcatagatatcacttcctattcttcgcttctcgcgcgtttattttgtctgcgacttgttgcccacttaatgtaaccattggcatgccaccaccaggatttactgatccacctacaaagtacaagttttcaaaatactgactttctttaggaaatttaaatcctttgtttttctttttatctgctacaacaccatatattgcaccacgattagaacgataatttttttcaatatcctccggtgtccaaacatcttcataaataatgtgttttcttaaatcagtaagtcccattttttctaatttatccaaaattttatccctaaacttcgcataatcttcagtggtaaaaggctgatcttgaatatatggaatatgtggtaagactttgatattttcataacctactggcgcttgtgtgtgatcagttttattcgtatttactagataaatggtcggatcatctggcaataccttttcatgaaaaacttgttgataattgagataagcattttccgtaaaaaagaaattatgatgtgctaattgcgggtattggcaagcaacacctaaatgcatcacatatcctgagcttgccggctcaaattccctctctaatttgtttaatcgttgagtatcaaggtgaattaaatatttataagtaggtatgacttccatatttgaaataatataatctgcctttacaaactcacctgtatctaatctgacacccgtcacacgtctttgatatgttttaatattgtccacacgtgcacctgtatgaattgtgacaccttcttcacgcgctagcttttccaaggcattggctaaatgatggattccaccttctacataccaaaggccttgctcttgttgcatatggaataacatagataatacagctggcgcatcgtatgatgaagaacctacatatttgataaaatagcctaacatttgtcgcaagtatggattcgagatacgcttgtctatggcctgttgcatagtatgtacataatcataattaataagagcatttaatggcccatgaaatttaataatttgagatagtgtatctaaaccatagttgaaataccctttttcagtaatacgatcgattcgtcttgtataattcaaataattttgcagttcctctatatcctgtttcgacaatatcgcattatgctgacctgtttctttaataccttcatacaaatcgatagtcgttccatctggaaaaaagctacgccattgatgtggcaatcgcttgattgtaacgtagtctgacatttgcttcttgctatattcgaataatttttcaaaaatataaggcatcgttaaaatagatggacctaaatcaaagccaaagccatctgattcatgacgattcactttgcctcctatatgattattttgttcatataatgagaccgaatagccactttgtgccattcgaattgctgcagaaatcccacctaagccaccaccaataacgatgatatgtttagtcatgacgttcacctcttcgttttaatatgcgtagtaactgcgttaatctcggtcgattatagcgttgcacaataatgattggaacattagctatcattgcatagaaaatatttatatactttactaaacgagggcctttattgaatatgatgactggaagtatcgatatccaatgaatcaactctgccctctttgtctctataatcattttttcaatttcatcagtattgattgtcattaaatgacgctgatcatatatattttgattaagctgatgaccatctaaaatcttatgtttccattttcttacgtaaaaccatttgttccaaaattttccatgcttctcaaagttaaatgatttaaatattatgtacttctgacgaaaatacttatcaggaattcttgtacctaaatttgctatatttagttgaacaattaaccaatacatactacaaaaaaatgctgttttaatatattttttcatggttttcatctaaattgaatcactctcaatcatactgacatagtataaattatcactttattacttagttccctaaagatcagtgaataaaccgctctcatttatatttatataaaacaaaaacgccaatactctcatgttagagaatattgacgtcatttgatttacatttgattaatgaatgaaattatatgaacctgcttggtttgctgaaattgtacgagacgtaaccacaccagcaccatgtccatagttcatttctgaaacacgaacagaaccgttgctgttaacgccttcaacgtaagcaacatgaccgtaatagccttgtgttgtttgcatgatagcaccaacttttggtgtattgttcactgtatagccagatgatgcagctgcgttagcccaattacttgcgttaccccatgttgaaccaattttcccaccaacacgatcaaatacataataagtacattgtcctgaagtatataagttacttcctgatgcataaccattagaaattgaacgaccatttgaagatggcgctgcagttgtagtcacatgaacattattacttgttgtgctataacttgcacctgaaccaccagtataatagttatttgttgctgtttgactattgtttgtatagttattgtattgatatgaatgattatagtagttattgtaagatgcattgttataactataagtattgtagttgttgtagtagtatgtgttgttttgcgttaattgacttggattccaatttcctgtccaagtgtaatgataattaccttgtgcatcaattgtatacgtatagctgtatgattgagcgtcattagaattatatccattgttattttgttctgcggcttgtgcatcatgtcctgcaaatgcgatagtggcaagtcctgctgtagcgattgtagctgtaacgatttttttcataattaaatatcctcccaataatcaaaacactctatacatatagtcattagcgactcaattattttaaattttatattttttatttttttagtatgcaaacaattataacttttatagttttgcgacaaaacaaactataacagagattaggtgtcttgcgggctttgttatcataatgtaatctgttcctaataaagcttcattgaatgtaatataccaattagaatgtttacaacactttttctgcaccgttactatgggatttgaaaataaaaaagcactaaacttttaatgaaatacatcatttttgataataaatatcagaagtaatgtaatatttcaaaagtttagtgcatcaaattatttcttatttgtagcatgtgtttccatcgtttttacaatcaaatcagtcagcgctttactacctgcatattctaagtgaataccgtcatatgcaaagtattccggatgacctgcagaagctttataccaatcgactagatgtacattagagcgcttttcagctgcctcataaattaatttatttattctaccttcataatctctaggtactctaatagaaactaaatatatgtctgcttttccaaaactatccaatagttcatttaattgatctttcgtaaatgccccatttgtaccaagctctactacaactttttgaccttttttagcatagtctttatattgcgatttcacaattggtgtagcatcaacgagttgccgtccaactttaccatcaatttgtgcatttggtattttcttagtaaagacattaccaatatccaccatgaccgagtcaccaattaatagtggtgatgactttttaatatcctctttgctattcgctgtctgcttatcctcttgcttatcttttttaacgacttttttcttcgttgttttaaattccgtcttcttctctttcttctcggcttcatgttgtttgccaagtgcatcaaactgtccactgagcacaacgatagacggaaccaataataggataactaacactgttctagcaaattgccccttctttttaggtaaaaatgcaaaagctttaaatccttttttacgtataggtgtttcaataaagcgatacgaaatttcagccattaacgctgttaacaaaatttctataatataaacgtataccggtatttgtccttgtacgtaataactgttcacaaaaacaatgataggataatgccataagtataagctatatgatcgtttacctataattagtaaaggtttcatacttaaaaatttagcaaataaactagaaggatgtaccgcaattgcaataatgaataaagttgcaaatgatataatgtaaaatcctccattatagatccattgatcttggtctccaactataaagaacaaagtcattagaaccgcaaaaccagatatccctataatatctaatgatacgacaatctttttagaaatatcttttttcaaagcaaacggaggccaaataaatgctaatatacaaccaagcaataaagtttgcagtcgtgtatctgtcccaaaatacacacgtgaattatctccagtgatgaaatgaatcactatcataagtcctaaagaaatcaacgatacaataaatagcgtttgaataatatttctcggtttaaatctatgtaataagaacgtgataaccaatgggaaaagcaagtaaaattgttcttcaatggctaaagaccataaatgtttgagtggttcaatagcaaattggttaaaataatctacattctgtgaaatgtaccaccagtttgaaacatagaatatagctgcaatagcatctcgtttcatttgtataatcaattccggtttaaatatcagtgtgaacgtaagcacgacacagattaaaaataacactgccggaatgagtcgtttcaatcgtcgcttccaaaactctagcaaatcgattttttgcgtccgataatactcacttatcaacaaacttgttattaaataacctgaaataacgaagaatgtatctactcctaaaaagcccccacttaaccattgtgcattcaagtgataaataatgattcctataactgcgaatgccctcaatccatctaatccaggtaagtatcgcggggaatacattttttctaaacgtttaaagtcttttgtatccatgttaataaacgccccatttatttttctctattttgtagtatatcacaatatttttgaaaataaaatattgcactgattttcattaattgatttaacccttaattaagatagttttaaattttttattaagtagaaaacaattattacagttgatttcattactgcaaaccacatataaatttgtcgattttactacataacatagattatcatagattcttgaatttttagcaaaataactgttattttcattatatttttacaaaaaaaggttcgttttatattttatgcatcttactgtaacagaatcattaagatatgctattcgaatatactttttcaaaatttatataatgaataaattaacatgtattgaaaaaaaagcgaaatgcagcctatcctctaatgtaaaccaaacgatatatctcgtcagactttatatttaaacgctatgtgtcacttttaaaatgaatattactaagattgtcatatcaattattattgcatcgaattaatcttttaaatttctgtaataaaacctattatctacatctaatttaggaaaactacttggtaaatctcctcgcttaatttcacggaagtcattattagaataaaaatactgtgcactaataaatttatcaattgttcctaaataaataccatcgatattttgttctttacatgtcattataactttatctaaaagttttttacctatttttaaattcctataacctttatcaacaaacatttttttaagtgcagacatattattatctagtctaatcaaacctatagtaccaacaatattttgatgattgtttattgcaagccaaaattgccctccattattcaaatagttatgttcgatgttctccaaatcaggttgatcatctctatcaatttttatattaaattcatttttttgaatcgataaaataaactcgattagctcttccttataagacctattatattcaattatgtttatagccatttttatctcctttttcatttaatttaattataaaatgtgcgtttagtttgtatctagtgtactcagtacagcctcaaatgaagtttcattccacttggcacttaataaagacaagtattttagcagtaatacaataaagtccaataaatttccctaacttcaatatccactttttaaaaaatgtatttttaattaataaaaaaactctccccaatttctatgggaagagctatatatttaatgtctaaacattacttttatttattatgaaggaattagaatccccaagcacctaaaccttgtgctttgtatgctttaacagctgcgttgatttgttggtcaacagtgtttgttggaccccaacctggcatagtttggaataaacctgaagcacctgatgggttgtaagcatttacttgaccatttgattcacgagcgatgattgcagcccatgtagaagctgaaacaccagtacgttgagccatgatttgagctgctgatgaaccagtagcacctgcagtattaccattgcttaatctcactgaacttgaagtagttgaagtgctgtagttatggtaagttggagctgaaacagcttcaacgtttgagttacttgattgtgcattgtagcttactgattgtacatttgaaccttggttgtatgaagtagtgtagtctgcacctgcaacgtttgagaaaccagcagtttgaccattagctgcttcatagctccatgaccatgtagtaccatttgaagtgaagttatattggaaaccatcttttacaaagtggatgtcatatgcaccatctttgattggagctgcatttaattgatcttggtgattatgcgctaagtcaactaagtgtgcttgatcaacgtttacttcagcagcgtgtgcttgatgtcctgtacctgctgcgtaacctgttacacctaatgccactgctaatgatgatgccataattgtctttttcatagtaaaaaatcctccagtaataattgtaagtttatgtttttagtaattatattttgaatttgaatgtcgtagtgcaagtttaaattgtcttttatttctttcaacggtactcactatatcacaaaaaaccagccagtaaattacactttctttacaaaacattacaatatcaagtgttatttgtaatgttgaaatatggctgttttatactgtaatgtgaaatatgtgccctttagaatccaatcaacccttgaaatagtctttaacacataagatttttactatatttagctcaactattacagctttcgtaatattacagattgtatttttgttacatagctgtaatatatctgacatgtaacttctcttattttcgtacattaaacgcaattaaaaagcaatcaacaaatatgtttctacacatgtattgattgctattattgttgtatattcaaagttttaaaacacacatcttttgtgaattgtcttatcttttattagcgcaaataaactgcagctcaattatattgttcaacttcattctcgcaattcacaataacattaaataatttttggtctcatattttcaaaaaacatactgttattatcccatgaatttaaaaatatcattagtatataaacgaaacactttacgataaatgatatctgcaagccaagctgttacaaatggtacaacaaagaacgctactacaattagtaagacactcaaccaagcagaatcaacctccataaatttaaatgcattaatcggtcctaccattcctataaaaccaaatccagctgactctttcgttccatgaatacctactaatgctgataccaaacctgatacaatggctgtcgttaatattggtaacataagaattggatatttcaccatattaggtatcatcattttaacgcctccaaagaagacggataacggcacccctaaacgattcactttacttgtaccaattatcaatactgcttcagtcgcggagataccaattgacgctgatccagctgctaaacctgtaatacctatcgcaaaggcaatggccacagttgatagtggcgaaataataataagactaaataccattgaaatcaaaatactcatgacaatcggttgtaattctgtaaaaccattaaccatattaccgatggctgttgtaatcattttcgtatacggcaatattaaaacaccaattgcacctgaaataccgccaacaactgttgggaatacaatcaatgccatactacctacgcgatgttgaataagtaaaatgaataacactgcaatcgctgctgtaatcattgtattaattaaatcaccaatacccgtaatcatccaagcaccatttttaaactgcgctgcaccgcttcctacatatgctgcacttgccacaacagcaattgctaatggcgataggtcaaatttcatggcaaccaatgcaccaatcaaagcaggtactgtaaattgaattgcaacgacaacgcctaataacgttttaaaaatcggatgataatccataaagtatttaaaaatttctccaagtatcgcattaggaactaaacccgcaacaatacctatggcgacacctgataaaactctaaatataaaatctttgggtgtaattgttttaattgatgtcataatatcatccttccatttatgtatatacatctgtatgcaaataataaagagccttaagttataagctgccactagcttaaattctaagatgtgcatgccgatgttgttatatttaggctagcagtatcatctataactcaagactatgaaaaatagtatatcacaaaattctgaatttttagataaataaattggcaatttttcaaacatattgttacaatacacttttattttatcttcatttttaaaatccattaatacaatagaagaaagacattcaaatgcttaccaaaaaggtacattatttgttaggagcgtatcagcacttacatatcatcaacacaattgacaatataatagaagatactgataataagtgttaaaacaacagatgttaggtagtgaacaaatgatggaaagtaaatccatagatccaagaatcgttagaaccaaacaattgcttgtcgatgcttttcttaaaatttctagagaaaagaaattatctcaaattacagttaaagatatcactgatattgctacgctaaatcgtgcaacattttacgctcatttcgctgataaagaagacctcctagactacacattatctgtaaccattttaaaagacttgaatgataatttgagcatttctaatgtcattaatgaaaaggttctgcgtaatattttcatttcaattgcgagttatatcaaagatgctgcaaagtcttgcgaattaaatagtgaagcattttgcaacaaagcacatcaacgtattaataatgaattagaagatatttttgcgattatgttagaaaacagctatccggagcatcaacgagatatcattgtaaatagtgcgagttttttagcagctggtatctcaggcttagcattacattggtttaacacgagtcaagagacagccgatgtgtttatcgatcgcaaccttccatttttaattcatcatatagcacatttttaataaaacttggtatttagtcatgcatcttgaaatcactatgtgacttaggttcatacttgtacacacaataaaatttaacgtattacgattgattagccgtgtctaggacataaatcaacgtcctatactctacaatgtcatattagcagtcgttaactgaatgaaaataagcttgtcattaaaacatatagattttagtgacaagcatttttgtttttgcgtacttaaacaacacttcaggcaatatgttgtttaggcaacaaatgatatgtgcgtgtttattggcaaacgtacgacatagtagtatagtatgtctaaacaacatatgttgcatagttgatatgcgttgtttaaatactaagataggagggattgacgtgagcgagacagatgaacctcaggggtttgaacgcacgcataatatattaaatattaatcagagtagtctgggtgtagtgacatacattacaaataaattaaagtcgacgttgaagcaacacataataattgctcgtggtaaaaagcgaatcgactatcgactgtcgtataacttttacactacgtattatgataatgtagaaatcaagaaaatcgactgtgaatatacctatgctatgcccattgcaattttaataagacacacgatgtcattcgacaatgctcatttctttgctcagttacgtcatcctgtcttataaaacaacattgcagacatgtatatcaaacgacacttcaataacatcactttgccatcgtactactagtaaaatcgtgtctcaaatcccttattttaattccaaaaatctgctggtcaaaagaccgagaaactaaaaacattacttaatgtgttgataaattaccatataaaaataatctcaaaatatatcaacacttgattctaaggaggatatgacaatatgaaaattttagatagaattaatgaacttgcaaataaagaaaaagtacaaccacttactgtagctgaaaaacaagaacaacatgcattgcgtcaagactacttaagcatgatccgaggacaagtattaacaacattttccacaataaaagtggttgatccaatcggtcaggatgtcacaccagataaagtttatgatcttcgccaacaatacggttatattcaaaattaatatttgctcacgaggtattgcacttaaggtgccaactgacctcataaacaaagcccatactgattgaagacactaatgtgtcgcaccatggtgcacattacgcttcatctctgtatgggctttttatttattcttttgagaatttcattttagcagaccaaaaaattaaaatggtgtccatcaagatctttgaacattgctccataaaacccttggcttactgttggttcttgaacgactgtgccacccgcttctttcactttattcaccaactggtcaacttcttcatttgtgttcacacctagagaaatcatcacttcatttggttcagtattaaggctttgctgacttacattttgaaaatgcttgttttctattaaaattacggttgtttgacctatttgaatgccgaccattttatctaacatttgtgggtttctatttattttaaatcctaacgctttataaaactgtgcgctcttttctaaatcttgcacatgcaaattaaaccacattgattgaatcatgattgcaccccattcattacttattatagttttggactttaagccaatcacttaatgataatcttgttggatttatttcagccattaattcaaagtctacttcataacctttttcttccaaccattgcttttctgcaacaccactaacaaattctccttctataacagtagatttacctgtcacttcactaaaaattgttgctgcttcacttaatgtaacttcatcggaaccaatctctattgattgatgcgtaaagctttgtggatgtgcaaaaatatacgatgcaattttagctatatcaatagaagaaatcattgtgaattttatattcggattaataaattctggtaatgtaatacgttcatcttcgactttagcaatgcgtaaaaaattatccataaagaatgatggtttgataactgttgcatttatattagattccattaatctattttctatttttgctagtacttcaaagtgtgggccagttcgatttcgattaacccctcccgcagtactatacacaatatgttgaatattttcttgctcagctatttcaattatcttcataccttgtcttaattcttcgctaacatcatctttaacgattggctgaatactgtataagccatacttacctttcatcgctgattgcaaactaacattatcactcagatcaccttcaacgattgataaatgcggatgtcctatgtctgaaagtttacgattattcttatttctagttaatgcacttacataccatccatcctctaacaactgttttacaactgcattaccttgcttccctgttgcgcctattactaaaatatctttcattttagatccactcctctttttatcttaaaaaccaatagtcctctttttcaccttttaaatacgtatatggttctggtgtttgtccatttcctttaatattgtcgtttattacatctctgacatcccatactaaatgaataaatcgttgtaattgatgactaaaaatgcctagtggcgctgtcatagctaatactttttccacatcttctgtagtgacattcagtttttcagcaatcatttgaaccgataaggtagatgcttcgaaatgtgcttgcaactcttcagctgtgatgcgtctttgctctttatttaaagacattatcaacactcttttcttttatgatatttaatagttattgcaaattcattgctaactttcttaacacgttttataataaacggagagttatccgtttgtcaattttagagaattttaagtaggtgtaatcatgcgaaaagatgcaaaagagaataggcaacgaattgaagaaatagcgcacaaactttttgatgaagaaggcgttgaaaacattagtatgaatcgtattgctaaagaactaggtatcggtatggggacattgtatcgacatttcaaagataaaagcgatttatgctactacgtcatacaaagagaccttgatatttttatcactcattttaagcaaattaaagatgactatcattctaattatgaggttatgcaagtgtcgttagattatcttttacaatttaaaatcgataataaggcactactgcaatgtattgaagcaggcaacaataaattacgtttttaccaaagcgcattttatcaagaattatttgatttttattatgacttatttaaaagcgatgacgacacttacacgaagttcaaaacagatatgctgttgcaatcattatcaactagtgtatttgccttccaaatagagcatcgccatatttcaattgaagcgtacagaaattatttattaaacatttatttagatgaggtgggacgtaatgactaaaattgtgttaatcacaggaggcaataaagggttaggctatgcaagtgcagaggcacttaaagcattgggttacaaagtttatataggttctcggaatgatgtaagaggacaacaagcatcacaaaaattaggtgttcattatgtacaattagatgttacaagtgactactcagtcaaaaatgcttataacatgattgctgaaaaagaaggccgtcttgatatcctcattaacaatgcaggtatatctggtcaattttcagcaccttccaaattgacacctcgtgacgttgaagaagtatatcaaacgaatgtattcggtatcgtacgaatgatgaatacattcgtccctctcttagaaaaatctgaacaacctgttgtcgtcaacgtatcaagtggtttaggttcatttggaatggttacaaaccccgaaacagctgaatctaaagtgaattcattagcttattgttcgtctaaatcggcagtaacaatgctaacgctacaatacgctaaaggattacctaacatgcaaatcaatgctgctgatccaggcgctacaaatactgatttagttggtgattttagtaataattccaaacacgtttctgaaggaatcaagccaatcattcaattagcaacgattggtgcagatggcccaacaggtacatttattaatggcgatggagagatgccttggtagatcaattttatgttacaaacattgaaattagaggtatataaaaaatgcttctgcaatagatgcaataaacatgcaatacaatatggaggcgaagtaaatgaaaagtattacgtttgaagaacattatgtcattgaagatattcaaaaagaaacgatgaatgcgatatcagcagatcctaaaggtgtaccgatgaaagtaatgttagaaggccttgaaaaaaagacaggttttacaaatgccgacgaattatcacatcatgatgaacgtatccaatttatgaataatcaagacgttcaaattcaagtcttatcttatggaaatggttctccttcaaatttggttggtcagaaagccattgaattatgtcaaaaagcaaatgatcaattggcaaactatattgcacaatatcccaatcgctttgtaggctttgcaactttacctatcaatgagcctgaagccgcagcgcgagaattcgaacgttgcatcaatgatttaggattcaaaggtgcgctcattatgggacgtgcacaagatggttttcttgatcaagacaaatatgacattattttcaaaacagctgaaaatttagacgtaccgatttatctacatcccgcgccagttaacagtgacatttatcaatcatactataaaggaaattatcctgaagtaactgcggcaacatttgcttgttttggttatggttggcacattgatgtcggcattcatacaatacatctagtattatctggtatttttgatcgttatccaaagttaaatatgattattggacattggggtgagtttatcccattcttcttagaacgtatggatgaagctttattcgctgaacatttgaaccaccctgtaagctattactttaaaaataatttttatatcacaccgagtggcatgttaacgaagccacagtttgatttagtcaagaaagaagtaggtattgatagaattctttatgctgctgattatccatatattgagcctgaaaaattaggtgtatttttagatgaactgggtttaacagatgaagaaaaagagaaaataagttatacaaatggtgctaaattattaggtttatcacctaacaattaacaaatggaggtcattgaatatggaaactttagaattacaaggcgctaaattacgataccaccaagtcggacaaggacccgtgctcatctttattcctggtgcaaacggtaccggagacatttttctgcctcttgcagaacagttaaaagaccattttactgttgtagccgttgatcgtcgtgattatggagaaagcgagttaactgaaccactccctgattccgcttcaaaccctgacagtgattatcgtgtcaaacgcgacgcacaggacattgccgaacttgcaaagtcattaagtgatgaacctgtctatatattaggttcaagttcaggttcaatcgttgcgatgcatgtgttaaaagattaccctgaagtcgttaaaaagattgcatttcacgaaccaccaattaatacatttttaccagacagtacttattggaaagataaaaatgatgacattgtgcatcaaattttaacagaaggcttagaaaaaggcatgaaaacatttggcgaaacattaaatatcgcaccaattgatgcaaaaatgatgtctcaacctgctgatactgaagaaggacgtatagaacagtacaaacgtacgatgttctggtcagaatttgaaattagacaatatacgcattcagatattactttggatgatttcacaaaatacagcgataaaatcaccctactaaatgggacagattctagaggctccttcccacaagatgttaacttttatataaataaagaaactggcatacctattgtagatattccaggcggtcacttaggttatattcaaaaacctgaaggctttgctgatgtattattaaatatgtggggttaattgattgttctctaataaaacagcttggacagttttcaaattatatttgatggctgaccaagcttatttttatttacgcttaaacgttcaaatcaactcgttattatacatgaaggcatgttaaccattctcttccactgaaaacactactgttccaaacattgatagtcttcttttgaaataccctttccgataagcaccaaatattctggcactttttttgaaaatgctacaggtgttaattcatattgtccttgtgtaaattgaatgagatacgtatgtgcggtgtcttcaaatgtcataaaccctttcaacctataaatatgagacggaaggcatgctaaacgttttataaactctgctttagtacatttgactggtgattgcacaaattgatgattaatcatttgatgtaaagacttatgtttattgtcagaagttgctgtcatttgtctaactgatattggcaaagtgacgctgccatgcataccgacttgtatatcggcctctgggttaataacttctaaatctttcaatagtttgctcgttgtttcaacatctgctgaatctattttattaacaaataagacagaacaatatgctaattgctcataaaataagccttggatgtctttagggaatgatttaatgtgtttatacatgcttgcgtctattacaccaatcatatgtgtaattgttgtaaacggagctaaaataggcgttaaacaagcatctaagacagagaccggttctgcaatcccactacattcaataaatacaatgtctggttgctcttttaaatataattgatgtaactgttctgatacatctgctttcattgcacaacagatacacccctctgtcagttcacttaaaggtatgtcttcagatactaaggcaccatcaacactcattttcccaaattcattcatgatgactgctggtttcagcgattcctttaatgattcagcgagcaaatgatttaagacagtcgttttaccgccacctaaaaacccacctataataactattttcatctgcgactctcctcttatacttcatatgaatagcatattccaagatagatctcctattgactgacatgactctatattcagttatagttcattttttttaaataatcagcattactattttaacaatgatgcctacaccaataactaaagacaatgatgtcaccatttgctttccaattaattttagtgctgactgaccacctaaatgtttcaaaagcatcgtcattgtgaccgagcacgctgtaaatgttgaactaaaaaacacaagtagtagtaactgtgttgctgtcattccttgtaataaggcgccctgatgcaaattaaacaagagcatgccgtcttttcgaatcattgaaaataaaatccctggtgacaattctgacgagatgcctaataacgataatataggtgtaaatatttgtgataaaacattcaaaattggcgttagtgataaaatactaacaataagacagattgtgataaaaataggtagcgcttgaacgataaacatttgtatattttgccacatttgtagcaacatttgacgtatatttggcatatgtaattgcctatcataaggtagcggaacgctaagttgttgatcattctttttcaaccatatcctttatgtaagatgccacctaaaagtactaatattaagtacggcataaatagccatgactttccagctacactaaaaatagataatgtcgcacctatttgataactacaagaactaccaaagcttattaaactcatacactgtgtcttcgtgcaggtatggcattggtgtgctgcttgtgaaatagctgctgcattacatccaaacccttctaatagtggcacgatatcattaccttgtaatcctatccataacattgacggttcaattgcccatatcatccatgatttgagtcctgtttgatcaattatagcagttgataaactaatcaatattacaaccggcaatgcccatacgagcgaatatgttccaagtgatagcacaccataatcaccaaataatatatgctgtaatatatcgtgattgagcaatgttgtttgagttaaatattctatccatgctgacacatactgattttgaaaccaatctgaaaattgataagcgataccgattggcaatgcaaacattaaaaatatcaacaaccaggctaaaaatgtcgcacttattttaggtcttaaatgtcgtcgctcatgttgaaatagtgtcaattgttctatcacatgttcactcgctataggcgaagaaactacactttctgccaatgaaatatctaatttctgttttatgattaataatcttaatttcgctttttctgttgcggtaagtttatccgcatgactaataaccaaataatgaggttcattaggtatgggcgtataatgcccagttctcatatcatatttcacttctaacatgtgcatgacacttcacaacatgaataatcatctaaatacatttgatttttttgataattttcaatgacatcttgtttagctggtaagccttcccgctgtgttaaaagatgtgcaagtactgcaaatcgcgctctaaatttatagatatagcataatttggcattatcattttcaactgttgcaccaatcataaaaatattcggataacgtgtcgattcatcatgtgttgttaatttaatatcttgatttgttgtcacaaataattgttgaacgattggattttttgttgcatcaaagccagttgctagtattggttcatgaggtgtaagcacactttgtccgctatcaaaactgatatgatactgtccattgttaaaatcaatatctttaactgtataatgtacattcatttcgatgcgagcaccttgcttaatgacattacctagtcgctgacgtgtataaggtgacaatctaacactaggatcagcatccggatcatttaaaccggttgtgctagtataaagtgcgatgtcagagccattttttgcaagttgatatgcagcatcaaagccactttcattacctccgataaccacatattgccccttattaaagttatcaaagtcttcaatttcactataatgaataccatatttaaatggctttttagggaaattataatcacctgttgcgacaaagatataatccgcgtgatatatctctgttgtcgttgcaatcgtataatatgcatcatctacagatatatttgtgacaactgtattttcaaagatattcagctcgtaatggttggcaaccacttgtaaatattcagcatatgtttctccggaaatatgttcttcattaaatgtaaatgctggtgaagtatccatggaaattgcattcatatcaggcatgccaaatccattagacgtaaatgatggcgtgatcgtacgggtcgatttcggccaatgtttaaatgaatgtcctactgttcctttttctaaaataatgacatctgttataccgaaatcttttaaggtaatggccatacctatacctgcagcaccggcaccgataatagccactttatgatgttgcatattaacactccctcaatgatctatttcaagttattgtttttgattataaatcgtaataattacgatttataaagtatagacctatccttgagaaatttcaatattaaaagaaaaacttccgttattgtagagaattcatctacatttcggaagttggtatgtgtctttttttaaaatttaaggctgctacgtttagttcaaatgattatgaatgacatttcatggtatcatccagcctcagtacttggagataacattttggcggtgagacagaaatcatatttttacaaaatttatttcgtcgtcccaccccaataaagaaaaagtatttctttattgttgtgtaacttctccacgttgtatttcactatccaaattttgtttcatattttcaaacaactcttgaaatctaacctcatcttgatcagaataacctttaaaaataactgaatctatattttcctcgttaaaataataaatttcatcttctacaacaccaatcggatatttacatgcagaatagtcaaacatatacttttgattttcaatttctacaattggtcctctattaataatcattaacttttgcgaaccttcttttaaataaataatgcttcctattgtttccatttattttcctcctttgtcaccgtctcaatttcaacattccttcgcatttccaagtcaatcatctcttcttccactttacgaatgccatgttgaatttgctgttgctgctcgtataacgcttccgttgaacgtcgtttcgcaaaatgaaattcatcgcggaactgttccatacgactagccatattgctactataataacgctcacctaaatgttgatataattgatctatcgaatgattaagcgcatcactttcatctatcaatgctttaacctctcgcttttcatcatataagtcatccatttgctcatgtttcgctgtgattattttattgatttcatccagtttattcgacatcatttcaccacgttttaatttttaccaatttcattaccaatcattacgtcagtttggtcaaaagcctcaccaactttttgtatattatcgctcgcagttcgtattgcttcagcaacagattgattcttactcatcaaatcatctatcacactatgagcattattatttccacttactgttgtactttcatctttatccggtttcgacacattattacatgtttcaacagcgcttttaatagatgatgatgcactattggtcttaaaaatatcactttgaactgtactcatcatttacacctctctccatttaaattattttaaaattattagaaactgtatcaatatatgatattcaaacattcaattatacttaaatattgttttatgattatattcaaaattattgtatcaataaatatgtatcattcctagaattttattgaacaaaaagttataaaatcacttttattgtaactcaaccttgttttacattacagaaattaacaatagcgattaaaattttattttccaacaataaaaacgcacaaatatttttattgaggcagctgtatcgcttctcattgtaaaaatatctgtgcatattatctatttatctcaatctaacgtcttaactaacttgttgtatcttgtaaaatcttatccatagaatgcgcaacactatcacggtacatctcaccaaatttcaataaatggaccatcaataaatataaacgataaaattcaagtctataggatgcaccttttgcgagtggataatgtttattatacgcatcataaaattcgctcgtaaaaccaccaaataccgttgtaataccgatatcgaattctctgtcaccatataatggcgctggatcaaataacgccggacgaccatcttgtaagaacatataattaccaccccataggtcaccatgtaataaagacggtttactttgatgcttttctaattccgccacaatttgacgtcgcactttgtcatatactttgatatcgttggcatcccatagccctctatttagcaactcatctttcaaatggtccaagcgtttgtcgacaaaaatggtacaccaatcgtcttgccaatgattatcaaaagaaatatcgccaccttcataaggtaatgagaagccaaatttgccttcttcttgttgctgactgtgtaattgagctacgagttgccctaattggcgttgactccctgaagccccttcttctaaatacgtcatcactaaatacgcatcaccgttaacctcgccacttgcaattactctaggtgccgtgatacctgcacgttcaaattcatttaaacctgcaatttctgcagcataaaatgattctttacgtccacgttggacaagtaagaaaaatgtatccgtatctgtttcgactcgatatgcttcgtttacatcaccaccactcactggtgaaatctctttaatatcttttaaaggtaaatgctctaaccattgttcattcatacaaacaccttccaatctacttactttatactataatattgcctaattaggatgatttaatcttaaaaacgttattcaaacttgcgtcaattttcaaaactttttagttttaactaggaaattatgtatggaaatgctagtctattaaaagaatatatttcacatatattaagttgaggatagtaagcctcaaatataatgaaataggagcatactcatgtacaaattaattaaacctttcttattcaaaatcgaacccgaaaaagcacacggactaactatcgatgcattaaaaacgttacaaaagtttccggttttattcccagtcgtcgataaactatttacttataagaatccaacgttatcacaaacgatacaaggtaatacgtacgacaatccaattggcttagcagctggtttcgacaaatcttgcgaagtaccaaaagcattggaacaccttggattcggtgctttagaattaggtggtatcacacctaaacctcaaccgggtaaccctcaaccacgcatgtttagattattagaagatgacgccttgataaatcgaatgggcttcaataatattggtatgaacaaagcactaagtcatttgcgtaaaaatgcttatcaagtacctgttggtatcaatgttggtgtgaataaaatgacaccttatgaagcgcgttatcaagattatataaaggttattgatacgtttaaacacgacgtttcatttttcacagtcaacatcagttctccaaatactgaaaatcttcaaaacttccatgataaagatgaattttcaatgttatgccaagctttaacagcatttaaaaaacaacatgatgtaacagtgccaatttatttaaaactaacgtctgatatggatttcgatggcttaaaagcactattaccagcgattactgagacatttgacggtatcatcttagcaaacacaacgcgacaacgagatggtttaacttctgctaataaagtcgaagaaggcggtttgagtggtcgtccattatttgaacgtaatttaaaattgattaagtatgcttatcagcaaacaaatggtgaatttttaattataggtacaggcggcgtattcagtactgaagatgcaatcaaaatgatgcgtcacggtgcgtcacttattcaaatttattcatcacttgttattgaaggcccaggtttaactaagaaaatgaacaaaggcatcgcacgttacttaaaagatcatcattttgacaatgtcagtgatattataggactagatgcctaatccaacatagtcaaataatactttaaaacttgctgaatcgtcttattaaaattatgatataactcaagaagatatatttatcaccatttttcaaaataatggcttaaatatcacatatcattaaatatagcgttttataacggaggcgtttgttatgactaaagaaacagataataaaaaaacagtagcgacttctgacaacaaagacacacagcaacaaaatcaacctgaagaagatgaacgtcaaggtttgaatggttatcgtaaaacagatcttgatttagaaatcgagcaagagctacgtgaaatgatgaaaacaggagaaaatgaaacgaaaaatgactataaaaagtttaaagtgttttcacttatttcaacacttgtcattgtcattttagcaattataagatttgttcataaaatgatgtaattagagtgagacattgttttatgtctcaggatccagttattcattatatctacaatatttacgattatataaataacccgagattttagtatgattcatttcactaaaatctcgggtttctatttgataatttttaatgggatatggcatgtatacgttcttgccttttatctcatttccaatgattaatctggatattgttctaaaaatgctttcgcttctttattaactgttttaaaatcaataccttgttgcatcgctgcaaagacacatccacaataacactgcctaaagatattatagtcattacacatttctatggaacgctcataacctttacttttcttaaaatcacttggcaaatagttcacatcgtatattttttggacatccataccaagttcattgattaattgtgcgttctttttaggtgataatgtgattgcactgccaaaataatcatagccatgttctacagctgctttcgctacaatatccaaacgcatttcaaaacaagcggtacaacgtaagccgccttctttttcatcagctaattctttatccttcaccattttcacaaacttatgcggttcataaggtgcttcaatatacttcacattcgcaccagtcttgcgattaaaatcttccacaaattgttcttgcactttagcacgtcgtaagtactcatttttcggatgaatatttgaattcgcgaaataaattgcaatgtctgcatattgtgttaaaaactctaatgtatatgtactacaaggtgcacaacaactatgcaataagattttaggtctgattgcttctctttcccactgcccgattaatttcttcaacaccttgtcataattaattttttgatttttcattttactgataataggttcagcattaatcatgatttaacctcccacatttaatcattaacttctattatatatgattcatattaaatgtcagtcaaaaaagttagaaattcattttaatgcatttatatttcgaaaatcccttatgtatctaaaagcattttttaaacttgaattttaaaacactaaacaacacatacgtctctgtgtcattttcattttttgtatgtcatatatatgtttacttcatttaaatcaatttcatcttataatttatcgtgtattttacaaaagattgacttcaattcatcgtaaaagttatacttttgccattttttaatgtaacatggtgttagtaataaaaataatacattgaggtgttttacatgacagcattattcccttatatcgcttttgaaaattcaaaagaagcccttgcatattacgaagaagtatttggtgcaactgacgttaaacgtttagaagttggcgaagaacaagcgtcacattttggtatgactaaggaagaagcgcaagaagcaactatgcatgctgaatttgaagtgcttggcgtaaaagtgttatgttctgattcttttggtcgcgctgacaaaattaataatggcatatcattattaattgattatgatgttaacaataaggaagatgctgataaagttgaagcattctatgagcaaattaaagatcattcttcaattgaaatagaattaccgtttgctgaccaattctggggtggcaaaatgggcgtctttaccgataaatacggtgttcgttggatgttacatggtcaagactatactgcaatccaacaataatgttattgataaagatatcatttaataagcttatgttatttagcaaggcaagccactctcgattcatggcttgccttattttattgtatatttttaattatcgttgctggcccttgattgacaatcgtattaaaatgccttattaagtcaactttgtctatacggtttggatcttctacccaatgtcttataaaagacaatcccgcacctgaaacataactcatgaaataagaaaatggtataccattaatttgatcattttcatttttataacgttgtaaatgacacataattaaatcataaagtttttcgtggatatttgaatctttacccatacgaaacatcaattgataaaatgcgatgtctttttctatcatttctattaaaacggtcataatttgatgtatgttatccgtggataacttaactgctccatttaacttctcatcatgaatgaagtctcttatttcctccaactgctggtcctctaatttttcaagcaaatcatacttatcataataatgcgtataaaatgtactacggttaacatcagctaaatctgcaatttgttgcacagtaatctcttctaattggtgttgatgtaaaagttcaataaatgcatttctcattgcaacttgtgattttctaatacgtcgatctatagtcatttatatcaagtcctccccaatgattataaacgttatgttcattatcccacaaatctccaacattgatgattggcacacaatgtttacctgtttaatataggtgatacaaacaaacagaaaaaggtgataacaatgaaccaacatttactaggaaatccaaaattaactgtaactcatgtcaatgaagttaaagccggtattaaccacatcgttgtcgacagtgttcaatatggaaatcaagaaatgattatggaaaaagatgtcactgtggaaatgcgcgatggcgaaaaattatatattaatattttcagaccaaataaagatggcaaattccctgtagttatgtctgcagatacttacggtaaagataataagcctaaaatcacaaatatgggtgccctttggccaacattaggtaccattccgacatctagttttacacctgaagaatcaccagacccaggattttgggtgccaaatgattatgttgtagttaaagttgcattacgcggtagtgacaaatccaaaggcgtcttatctccatggtcaaaaagagaagcggaagattattacgaagtgattgaatgggcagcaaatcagtcatggagtaatggaaatatcgggacaaatggtgtttcttatcttgcggtgactcaatggtgggtcgcatcattaaatccaccacatttaaaagcaatgattccttgggaaggcttaaatgatatgtatagagaagtagcctttcacggaggtataccagatactggcttttatcgtttctggactcaaggtatttttgcgagatggacagataatccaaatatcgaagatttgattcaagcacaacaagaacatcctctgttcgatgatttttggaaacagcgtcaagtgccattatcacaaattaaaacacctctactaacatgtgctagttggtctacacaaggtttgcacaaccgtggctcttttgaaggatttaaacaagctgcatctgaagaaaaatggctatatgtgcatggacgtaaagagtgggaaagttactacgctagagaaaatctcgaacgccaaaaatcattctttgatttttaccttaaagaagaaaataacgattggaaagatacgcctcatgtcatttatgaagttagagatcaattttataaaggcgaattcaaatcagcgtcagcgttccctttacctaacgcagaatatacaccattgtatttgaatgctgaaaatcacacattgaatcatgcaaagattagtagcgcgcatgtcgcacaatatgactctgaagataaacaacaagatgtaagttttaaatatacgtttgacaaagatactgagttagttggaaacatgaacttaaaactatgggtaagcactaaagactcagatgatatggatttatttgcaggtattaaaaagttagatcgtcgtggtaatgaagttaacttccctgattttaatcatattgaaaatggtcaagtagctactggttggttacgcgtatcacatcgtgaattagatcaagaaaaatcctcaatcgcgcaaccttggcataaacatgaaacagaattaaagttgtcacaagatgagattgtacctgttgaaatcgaattgttaccttcaggcacgctatttaaacaaggcgaaacattggaagttgttgtaaagggtagtgaaattgtaattggtaatagtactcctggcatgaaaacacgttatgaacatgaagaaaccgtaaataaaggcatgcacatgatttatactggtggtaaatatgattcacaattaatcattcctatcgttaattgatatgcagcaattacggtcgcttttgattaaaagtgacatagtgataggactgtataacaagagaaagccacacgcttggaatcttaaaccaaggtgtggccctttttattattgatggctatttaattttataacactatcgtattttctttttcatgaatcatttcaataatgacattatcttcattcattactgctactttaggtgcatggtttttaatttcttcttcattcaactgtgcataagtcatgattatgactacatcgcctacttcaacaagtcttgacgctgcaccgtttaaacaaattttaccactacctctttcaccagctattacgtatgtttcaaaacgtgcaccattattattattcacgatggctactttttcatttggcaagatgtctaccgcttccaatatatctgaatcaatcgtaatgctacctacataatttaaatttgactcagtcactcttgctctatgaattttagcattcatcattgttcttatcactttattcagctccaattattatattatctattaaacgcgcttttgaaaatttaacagctaacgagataaatatgcgtccagttatttcgtgttgttctactaattgaggataactataaacagcaacttcttcaatgcgttcacttatatgtgattcaagatattcagtaaccctgtctataattactttactttgacgttcaccgtcttgatacaacgcttgtgctaatagcaaacttttacttaaatgtaccgcttcttgtcgttcttgctccgttaaataaacatttcttgaacttttcgccaaaccatctgcttctcgaacgatatcaataccaataatttcaacggcatgattgaagtcttttaccatttgctcgacaatagccaattgctgggcatcttttttaccaaaataagcataatccggcataacaatattaaatagcttattaactactgttaccaccccatcaaaatgccctggacgcttcgctccttctaacacatcagctaatgggcctactttgacatcaatacctaattcacctggatacatatcttctactgcaggatgaaaaacaatgtccgctcctacttctgatactaattctaaatctttatcaatttgtctcggataagcatcgaaatcttcgtttggaccaaattgtaatggattaacaaatacactcacaattgtaatatcatttgtactaactgattcgcgtaccatcgttaaatgtccatcatgtaaggcacccattgttgggataaaaccaatcgttgtgcctgagcgtttggctgctttaacaatgtgttgcatctcttttaccgtagtaatcagcttagtcattgttattaacctcattcataattttctttttatacgtatattcttctgatggaaatgcaccagatttaacttcttgatcgtattgttttaaaccatccacaccaacactaaaatcagcaaattgcttcacaaatttcgctttatgttcaacaccataatttaacatatcgtgataaaccaatacttgaccatctgtaccttttcctgcaccaataccaatgactggaattgttaagtgcttgctaatttcttctgctaaatcatttggaattgcttcaagtactaacgcaactgcaccagcttgttctacatttttcgcgtctaaaataagttgctccgctgcttctttcgttgcaccttgtaatttataccccataacgccaacactttgaggtgttaatcctaaatgtgcaacaacaggaataccaattgccgttgctttttcaataaatggtgtaatatgcgctccttctgctttaattgcatttgcattcgtctcctgataaagctttagagcatgatttaagtcttgtgtcatagagatgcctactgcaccaatcggcatatcaacaactacaaatgtatttggtgcgcctcttcttactgcacgaccgtgatgaatcatatctgctaacgtcacttgtacggtactttcataacctaatacagtcataccaagtgaatccccaacaagaatcatatcaatacccgctgcttccacttgtttagcacttggaaaatcataagctgttaccatagaaattttagtttgcttttgtttcatatctattaattgacttactgttttcaatgttattcaacctctttttgcagtattattagaaatagtataatgaatcttttatagaaaggaaagaagaagatgttatcagttgcgattatcggcccaggcgctgtcggtacaactattgcctatgaattacaacaatcattgcctcatacaacgcttatcgggagacacgccaaaacaataacatattatactgtaccacatgcacctgcacaagatattgttgtgaaaggttatgaagatgtcacaaacacatttgatgttattattattgcagtcaaaacacatcaacttgatgcagttattcctcatttaactcatcttgcacatgaggacacgctcatcattttagcccaaaatggttatggtcaactcgaacatatttcatttaaaaacgtatgccaagcagttgtctatataagtggtcaaaagaaaggcgatgttgttacgcacttcagagattatcaattacgtatacaagataatgcattaactcgacaatttagagatttggtccaagacagtcaaatcgacattgtattagaagcaaatattcaacaagctatttggtataaattgttagttaacttgggcattaattctatcacagcactcggtagacagaccgttgcaatcatgcataatcctgaaatacgtacactgtgtagacagctattactagatggttgtcgtgttgcacaggcagaggagttaaacttttcagaacaaactgtcgatactattatgactatatatcaaggttatcccgacgaaatgggaacgagcatgtattacgacattgcgcatcagcaacctcttgaagtcgaagcgattcaaggctttatttatcgacgtgcacgtgaacacattcttgacaccccatatcttgatactatttatagctttttacgcgcgtatcaacaaaatatgtaagcacatatataatataaaaagaccttaacgatgcatttagaaccacctgttcctaatatcgctaaggtcttttaattatattagactattcagcttctctaatttcttctgccacatctttatagtctattttcgctttaacaaacgtctcgttatttaccgggaaatgttgttggaatgtttcaaagttttgtatctcaacgacaacgtcatccacttcaaagtcaagaacatgtccaccataagctctttcatcatccgcaaaatgtatatgaaaaccagcagaccctacgccatgaaataattctggtgtaaaaaatccaacaatggcaccacgaatatcttgtcttttttcctcaggttgtctgcgtgctgaatcaatcaaacgtgtatatggcggttgctgagcaggcatcattcgtacatgcatatgtttaaatgtgccataaattttaacagccgaaaataaattctcacttaacatttcatttttaatttgtgcaaatacatcatcttgtgataattgttgcaatggaaatgtcttactcgctttaaaattagtaatcgatgcatacggtactttctcatcgccttttaattctataaattctttatgctcgttagcatgatatgcctttccgtctaaaaatattacttcgccatcagaccctgttaacgttgcaatccctaaattcccatgttctaacaattcattaattgtagctgtgccttctagtaagccagccattaacgtacctaatgtaccatgttgatacaagacattcgtcattccaaaaccatctccctatagttattcctcgttgtcatgctctacttcgtgattaatgcagaactactttcctttatactcaatgacgcctcaacatttttattcatgtcactaaattttcacgagtcataatactttattcaattattattttacgcaaaagtattgcctctatcaatgcttgctaaaaaaatggacctatcagtgccacgtgttactgcaacactaatagatcctcttaccattaatatatttctaattaatacttaaaataggcttagtcttctaataaatatttaattgaatcaaatgtatcttctaatgttttaacagatttatcgaacaacgcttgttcttcggcacttaatggcatttcataaattttaactgcgccatgttggttaactaatgttggtacacctaggtaaacgcctttgtgaccaccatattgaccatctaattgtatagaaacatttaagacattattttcattatttaaaatggcttttgaaatgcgcatcaatgctaatgcaataccatagtatgttgaccctttagcttggataatttcataagcagcgtcacgtgtattcacataaatttcttccgctttagcttcgctaccagtttgttcttttaatgtgtcatatactgaaatacctgctacatttgcttgtgaccaaactgcaagttcagtatcaccatgctcgccaataatactagcgtcaacacttgaaggtgcaacaccaagttcttggctaattaaatattgtaaacgtgcactgtccaatacagtacctgaaccgataacacgctctgctggtaatccagtatattcttttacaaatcttgttaaaatgtctacagggtttgccgcgattaagaaatatccatcaaagccactatccataacactcttaacgatgctcttcataatcttagtatttttttcaactaattgtaaacgtgtttcacctggcttttgaggtgcaccagctgtaataacaactaaatctgcatctttacagtcttcgtattcacctgctttcacatcaactggtgaaggactgtggactgtaccatggtttaaatcttgaacatctgcttttactttgtcttttgcaatgtcaataattacaaattcatcagcaacaccttgcgtaaccattgcaaaggcatagcttgatcctacagatccatctccgattaatacaacctttttaccaaatgttttcataattatgtctcctaacctaattgaatttattttacacgtgactacacgtaaaaatatctatactgaaattaaagattaacaattttattttattataatattatgctaccaaattacaaacataaaactgagatgtaagcggagtcaaattacactctatcgccaataaatattgatatctcaagctttagcacgtaatttgaaatttgtgacaatttttagcattctaaaattgcgtaacgacgctatttaaaggctttaacaaactattgagctttctatttttttcattttaaaaaggatggctattcgacttaaatgacttactatataacctcctattttccgccttaccctcatcatatttgatgcatcattttatagtcaaagaattacatttcatacaaactagccaatcagacataaacatgaaattgattttaaaaatataatgtgcaaaattgttagaaaattagcaaaaaatagtacttattcatttaatatctgttataatcagttttatcatttaaaaaatctatggatgttatcaagacaagtcattaatacgtaacataaagttgtgatttttcagaatttttagacaaaatattgattatttgtgctatgatataacatattaaaaaacaccgtatagaattgtttatgaatgtttgggaggaaagtttatgggaagttttttcaataaaatagcacgaaaagaggatccggctatctatcaaaataaagatggtcatttaaagcgtacacttcgggtgcgtgatttcttagctttaggtgtaggaacaattgtatcgacatctatctttacgctacctggcattgttgctgcagaacatgcaggaccggccgttgcgttatcattcttactcgctgctattgttgctggtttagttgcatttacttatgcagaaatggctgccgctatgccatttgcaggttcagcctattcttgggtcaatgtattatttggtgaattttttggatgggttgccggttgggctctattagctgaatattttatcgccgtagcctttgttgcatcaggattctcagcgaatttacgcggacttgtgaaaccaattggcatcgaattacctgcagcattatcaaatccatttggtacaaatggcggttttatcgatattattgctgctatcgttattttattaactgcattattactatcacgtggtatgtcggaagcagctcgtatggaaaatattttagttattttaaaagtattagctattattttatttgtcatcgtaggtttaacagcaataaatgttagtaactatgtgccatttattccagaacacaaagtaactgctacaggtgactttggtggatggcaaggcatatatgctggtgtttcaatgattttcttagcgtatatcggtttcgattctatcgcagcaaactcagcagaagcacttgatcctcaaaagacaatgcctagaggtattcttggttctttaagcgttgctatcgtattatttattgctgtagcacttgtgttagttggtatgttccattactcacaatacgcaaacaatgctgaacctgttggttgggctttacgtcaaagtggtcatggtgttgtagcagctattgttcaagctatctctgttatcggtatgtttacagcattaattggtatgatgttagcaggctcacgtttactttattcatttggacgtgacggcttattaccttcatggttaagccacttaaacgacaaacatttacctaatcgcgcactagttatacttactattattggtgttttaattggttctatgttcccattcgcatttttagcacaattaatttcagcaggtacacttgttgcatttatgttcgtttcattagcaatgtatcgtttgagaaagcgtgaaggtaaagatctaccaattcctgcatttaaattacctttatatcctgtgttaccagcaattacatttgttttagtattgctagtattctggggattaggattcgaagcgaaattatacactttaatttggtttattgttggtatcatcctatatttaagttatggacttagacattctaagaaaaatgacgtagctgaataccacccaccaaaataaaaaataaaaaaatcatttcccatctgattaacatccagatgtggaaatgattttttattttatattaagataatcgctattaccaaccttgtccagatatgtcatattgatctaagttacctgcttccaaagcagtcagtgcatcttctatagtgtttaacgccgtgtctaattgctcatatgttattaccaatggcggttggaatcgcaacacatttcctgctacagctataataactacgccatgctcaaagcagtaattacaaattttaagtgccgcactggcatcacgtgttttgagttttttgtcggaaacaatatcaataccaatgctcagacctttacctctaacatcgcctacactattgtatttagatacccattgatccattcgtttcctaacatattcccctttttccgcactagcctgaagaagcgactgatcttcaatcatttgaattgtggctaatgcagcttcacaactaactggattagcacctgttgtaaataaatgtgctggtgcttctaaacaattcataatctctttgcgtccaacaattgctgacataggcataccacctgctaaggattttccgaaagtgattaaatcaggcgtaaaattaaaatgcgagactgaactccatgtacctgttctcccaaaaccttgttgaatatcatcgacagcgattaaaataccatgttcacgacaaatcttttctaacgcttcaaaataccctggaactggttctaaaagtccaccatcgccttgtatcgtttcaataacaatacatgctacttcgtcagcaggtacatacttcgcaaacatttcttttaagggtgctaaatattcttctactgaattagcttgtggctgctcgtacataccacgatatttatctggaaacggaatatgataaaaaccattcaataacggaccataatgtttgcgcatatttaaactaatagctgacatagacaatgagccaaaagttgaaccatgatatgcattagtgaaactaatgatataaggacgccctgtatatgctctggcaaatttaatgatgccatcatttgcgtctgatccggttaatccgaaggtcactcttttttcaaaatctccaggtgcaatctcacaaagcttcttagctaaacgtaccaacggttcatgatacatatatgctggtgtataatgaataaatttatcaacttgtgcctttatcgcttctgttacttctctaggtgcatgacctacgttttgagaactcgcactcgataacaaatcgatatatgtcttcccctcaatatcaaccaatgttgctccatatccatgatcaatcactaacggataatatttaatacgtcctgatttcgcaaaataatgttcatcctcttgaattaattgatgtgctttactcatatacattcccctcccattgacagtattaatgtgcaagcaaagtggcctctcttaaatcgattataaaatccgatttaaaatcctgctcaaataccgtcatgcctctatgaatactatccaatatactaataaaattcagatttgtaaatatattctgataattaagaattttatatcaatctactttgtttatgcgcataattttgttcgattagggaattgtttactatattccatttgactctgaggtgatacgaatgcgtttaaaagtattgttccatttcattgctgctattttcatatcattcatgttgctatggatgaccatgttgtttgacttaataagcaatcaatcacatttaaaagctttattattgaatttagattttctaattccttctgacaatacaccatatattctagaaataatatgtcacttactaattggtagcgtcatttattttgtatttgtgttgctgtttcatacttctaaaaggctttactatctatgttatatccctttatttttcttatttatagcattgtatccctttttagtatttattgcgcaacgtccaatttttcaatttagtgtgacagaattaatcggttggattattacacatattttctttatgtcattaatggcgttagtcatacctagaataaaataatatttttaattaaactgacaattatttttcacattttatacacttttcaaggtttatgacttgagaaatgttctcatttttatcatactggaggtgtattgaaaagttaaggagtggaaagtatgaataaagagcaattagaaaaaatgaaaaatggaaaaggctttattgccgcattagaccaaagtggtggtagtacaccaaaagcacttaaagaatatggtgtaaacgaagatcaatatagcaatgaagacgaaatgttccaacttgttcacgatatgcgtacacgtgtggtaacttcaccttcattctcaccagataaaattttgggtgctattcttttcgaacaaacaatggatcgcgaagtagaaagcaaatacactgcagattacttagctgataaaggtgttgttccgttcttaaaagtagacaaaggtcttgctgaagagcaaaatggtgttcaattaatgaaaccaatcgacaacttagacaatttattagaccgtgcaaacgaacgtcacatttttggtacaaaaatgcgttctaacattttagaattaaatgagcaaggtatcaaagacgttgttgaacaacaatttgaagttgctaaacaaattattgctaaaggtttagttccaattatcgaaccagaagttaatattaatgcaaaagacaaagctgaaattgaaaaagtattaaaagctgaacttaaaaaaggtttagatagcttaaatgctgatcaattagtaatgttgaaattaacaattcctactgaaccaaacttatacaaagagttagctgaacatcctaatgttgttcgtgtcgttgtattatcaggtggttacagcagagaaaaagcaaatgaattacttaaagataacgctgaacttatcgcaagtttctcacgtgcattagctagtgatttaagagctgatcaatctaaagaagaattcgataaagctttaggtgatgctgtagaatcaatctacgacgcatctgtaaacaaaaactaatttatacattaaactattttttgatataaactactaaaaaggactcatacatgtgctttaaaggcattgtgtatgagtcttttttgattaaagttgattttgccgtatgtattagattacgtaaaaaaatcggacagctgaaaaatctttaagatttctcagttgtccgattttaaatatagctattagaatttagttttcgtagtaacctaattctaagtcttttgaagtttgtttacggatttttctcattaatttttcgtcttcaattaatgattcaccgtatgatggaatcattttcttaattttaggtgcccattcagttttgtattcagggaagttacgttctaatacttctaacgcaactgaaactgaagttgaagcccctggtgattcacctaataatgcaattacagtgtggtcttgtgagttaaccacttctgtaccgaattggatgaatcctttaccgtgttcaggtgtatctttgataacttgtacacgtttaccagcagtgtataattgccaatcttcattacgtgcttctggatagaaagtacgtaagtggttcatacaaccttcttttgtcataattacttggtcaaatgagtatttaattaaaggtaagtttttaactgctgctgctaataaagttgtaatgttgtatgttttaacagacttgaataaatctaagttagaaccatttttcaagaatttaggtccaacattagcaaatggtccaaataataatgttctttgaccatcaatgtaacgcgtatctaaatgaggtacagtcattggtggtgtaccaggtggctctttaccataaactttggcatcgtgttgttcaataacttgtgggtttgtacaagctaagaattgaccactgatagggaatccacccaaatgtttactttcagggatacctgttttttgtaataatggaattgctccaccgccagcaccgatgaatacgtagtcagttacttgtttgaatttctcaccagttaggcgatttttaacagtaacttcccattgaccatttgataattgttcaaaatcaacaacttcatggttaaattgcactgtagcatttggatgtgcttcaatgcttttagccattttacgtgttaattcaccgaagtttacatctgtaccttcgtcaattttacttgccgccatgataccagggttatcttcacggcctttcatcatcaatggaatccattttttcattacttcgatgtcttcagtatattcgatattatcgaacatagggaaagctttcatcgcttcgtaacgatcttttaagaatttaacattgtttttacctctaacataactgatgtgtggtaatggattgataaattctcttgggttctcgatgctaccgcttttcactaagtgaccccagaattgttttgaaatctcaaactcttcgttaatcactttcgctttttcgatgtcgatagaaccatcaggttgtaaaactgtgtagttcaactcacataatgctgcatgacccgtaccagcattatttctttcgtttgaactttcgattgcaggacgatccaagcgttcgtaaacgtggatattccagtctggctcaatttcttttaacattgaaccaaatgttgtgctaagtacaccggctccaattaaaacgatgtctttactattagacttagccattggtttcacctctccaaaaattgtaaatgtgtatcatcaatatgaaagttacataaaactgacatatttctttaaaatatcaacgccattgataacttcctgttttaattgatacgctgtaacaaaatactatagttagtgcttacatgtatatgttaaagcaagcagtggtaaatgtaaattataattattcattaactttgcaatatattaaatcttttattcatagaagataaatatcaaatcaatcataattatttgacaacaaatagctaacgattgttttaatctacatttggcttatagcattttaaacctatactctattttgatacaatataagtgtaaaatcaatcataaaaaggatattcaatatctgcatccaagaaaaacattacaattacctttaatattgaaaattattttgaatcttgcacttataggtattgtaattatcgttctaacacatactgagtttcaacttaatgccggtgatagtaatgtgtttttattaaactgggatattcgaggtttaacatcttatattttctcattcttaatactggttgcgcttgtttctaaactaattttaatatttataactagacgacaaagaacatcataaataaacaagcagtccagtgcgtatcatcataccttacgcattggactgctttgctatgtttattgattgctatctttttgttgttgccatttttctatttcagcatctcgtagttcaacacgacgaattttacctgagtttgtttttggtaagtcgtcaacgaattcaatctctctcggatatttatatggtgcaacttcatttttaacaaattgttgtagttctttaactaacgtatcatcacccgcagtatggtcctgtaaaataacgaatgctttaacaatatttcctcgtatatcatgaggttttgctactacagcacattctttaacggctggatgattcgttaacgcatcttcaacttcaaaaggcccaatcgtatagcctgaactaataataatgtcatctcgacgtccttcaaaccagaaataaccatcatcatctacatgagctaagtcaccagtgatgtagtatttacctgtttgcgctttcgccgtacgttctggctctttataataccctttgaaaagtgctggcaaatcaagtggtactgcaatattccctttcgtattagcaggtacgctattcccctcatcatctactacagtgaccgaactacccggaatgcctttacccattgatccaatcctctgtggtgtatcttttaaaaagcctataagcaaggtactttcagtctggccatatccatctcttacagttaaattaaagtatttcttgaattgttcaactacttctcgatttagtggctcacctgcagaaacggcactatgtaaatgcgttaagtcataatcatttaagttctgtaatttagccatcatacgatattctgtcggtgtacaacataaaacattaatttgatatttttgaagcaattctaagtatgtttcaggactgaaccttccattaaatacaaaagcagttgcacctgaacctaatacagataagaaaggactccatacccatttttgccaacctggtgctgctgttgcccaaactaagtcatcttcattaatacataaccaatgttttggtgccatttgtaaatgtgcaaatccccatccatgacaatgtgtaacggctttaggattgccagttgtaccagatgtatatgacagaatcgccatatcatcacgcgtcgtatctgccatttctagtttgttacttgcgttttctttttcagcttcaagtgaaatccatccatctttttgaccggcaataacaaatttagttaacgcatcatattctttaattttttcaaattcaactgtgaatggctctagtgcaataactgcattaatttcaccatgtgtgatacggtattgtaaatctttagttcttagcatttcagaacatggaatgattgcaacacctaattttaaagcagcaatatataattcatacgtcgcaatagatcgtggcatcataatgagtactttatcgcctttagataaaccgtgcgatgctaaaacattacctactttattagactgttcaatgagctgttggtaagtgactgatatatcttcgccttcagtattatgatataaaattgcctttttatctggtatgtggctatatttttcgatttccgaaataatgttatatttttcaggcgcgaatagagctgacttttgcataactaacttcctttcatacatccacttttcctgtgatgaacattgtaattttataaatgaattatatacatcatacgcctatctttacagaattttcaattaaatagggttaaataccaaagtcctcgacactacactttgacatgacgtagcattcaaggactttcaaatgattgagggttgatatctcgggctagaccatatcagctaattcaatacgaatattgtatgataattcacgattaattatttttacatctgcacctttcgaagtgccacgatgcttgtgtgtatgcttgtactcagctgaattttgccaatgataaaatgcttgcctattttcccacagcgtaataatgatatagtgtctaccagctgttctaggtcttaaaaaccttaatgctttaaatccatcaacgttttttaaatgcttattacgtcgcaaaaatttttgctcgaatgtttcttcttgtccttcgttaatatataaatgatttaacacacataatgaatcatttgataaatcatttatcgcttctagcacatcgtaatatgcagtgtcattatttttttgtattgtgagacaatcatccagttcttctattacataacttctatattcatcataaattttcataataaatgccttcatttcatttatatttttggtcatattactttatatctattactaattcattcccgtatttattaattacaatcatagtttggcttctttttaaaagataagactttgtaaaaagtattaatatttcatgcaaatgggggacaggagtcgcccactatttttgtgtcttcaatttcatgatcattatttaacattagtcatgaaaatagccgacaacttcatctgtgaaatcaccggccttttattttagctaactttatttctgattttacgattttaattgatcatacagagaaagtgatctttttacaatttctaaaaactcatgatctatattggacatttgatgaaaataagacaaaatgttttctgttagcttctcttgttttgggaatgaatcatcttctttaatccaaatcgctaattcgcctaatggtgttttatcatctttaaatgtttgtatatattcgtaaaagctcatagtattccttctctcaatttacttatataaatcctaccacgaaagctttcaagaaaacacaattaaatgtctatttagtgaactttttaaggttgtgcactcttttaatgtctgccaattaggtcaattaatcatcacaatgtacaattaactctattttcagttcatatactcacacaccgtttttgaacaacacattaacttctcatttagataaaacgcaaaaaagcctggcaccaatacaatagatgccagactaagagtctactatataaatttatttagcgtatggttttacttcgattgcaccttcattttcatcatgaacaccatgcttataataatcaatatattgtggctctaaaggctttctgccacgtataatgtctgctgctttttcagctaacattaaaacaggtgcgtgtatattgccatttgtcgtacgtggcatagctgatgcatcaactacacgtaaattttccataccgtggactttcattgttaacgggtcaactactgccattggatctgaagcaggacccattttagcactacaagatgggtgtaatgctgtttcaccatctctacgaacccaatcaagaatttcttcgtctgtttgcacttctggtcctggtgaaatttctccaccattgaatggatccattgctttttgagataagatatttcttgctacacgaattgcttctacccattcttttttatcttcttctgttgataaataattaaagcggatacttggtttttcgaatggatctttagatttgattttcaagctaccacgagagtttgaatacattggtcctacgtgaacttgataaccatgtgcgaccgctgccttttgaccatcatatcttacagctattggtaagaaatggaacattaagttaggataatcaacttcgttatttgaacgtacaaatccgccaccttcaaaatggttagatgctgctgcacctgtacgtgtgaaaatccattgtaaaccaataaatggcatgcgcttgatatctaagcttggctgtaatgatacaggttccttacatttatgttgaatgtatacctctaagtgatcttcaaagttttcacccacaccaggtaaatgaacacgtggctcaatgccttttgattttaggaactctgaatcaccgataccagataattgtagtaattgtggcgtattgaatgccccaccagacaaaatgacttcattagcatcgatggtatgtagtttgccatttttcttatacgtaacaccagttgctcttctaccttcataatgaatttcagttacaaaggcacgtgtttcaacggttaagtttttacgcttcatcgctggatgtaaatatgctcttgaagctgacattcggcgaccacgatgtacttgactatcgaacggtccaaaaccttcttgtctaaatccattcacatcaggtgttttatgatagcctgcttcaacacctgcatcaaagaatgactggaataaaggattcgttgctggccctcgttttaacttaattggtccatcatggcctctaaatttatcataaggcgctgcaccgtatgttttttctaattttttaaaatacggtaaacagtgcgcaaaatcccaagtttccataccttctggttctgcccagccttcatagtccattggattaccacgttgataaatcatgccattaatcgaacttgatccacctaaaactttacctcgggcatgtgctactttacgaccgcccatatgtggttcttcatctgttgaataaatccaatcgtaaaatttattgcctgaagggaacattaacgcagcaggcatttggataaataaatcccaaaaataatcactgcgacccgcttctaatactaagacttctttatctttatcttcactcagacgattacctagtacagaacctgcactgcctcctccaatgatgacataatcatatgatttgtttttgttactcatcgttatgacctccaaagtttgttgtatttcaaagtgagtattgcatgaaatatttgttagtggctgattggttatcgttgaattgctaaacttagctaaccaaaacactcgcttttccttttacgattgttactaacagtaatgaaataatctatgattcattttgcgtttagtccaaattatcaatcaacatttcgccacttatacaaaacaaagtgagtgtcttgtgttcttacaatggcactcaccttatctaatttttatttgctaaaccaattcactaattgtggatttgtatttgttaaaatgtgttttgaaacaaggtactcttctaagccttctttgcctaattctctaccgatacctgattgtttgtatccaccccatggcgcttgtgcaaaatatggatggaaatcattaatccacaccgttccaagtttcaacttgttagcaacgcgttgtgcttttccaatatctttagaaaatacagcacctgctaaaccatatatagaatcattcgctaattgaatcgcttcttgttcagtttcaaagccttctacagtaacgacaggtccgaaaacctcttcttgtacaatacgcattgacgtatcacaatttgtaatgactgttggctcgaagaatagaccatcttttaaatcatctctatctggacgtttaccaccaacagcaattgttgcgccttctgctttagctacatccatataagattcgatcttattacgatgttctgttgaaatcactggtcccatttcagtatcagcatcaaaaccattacctaatttgatttttttcacgcgatcaataagtgcttgctcaaatttgtctttaatactgttttgtactaatattcttgatcctgctgaacaaacttgacctgcatggaaatatccaccatttaacgcttggtctactgccaattcaaaatcagcatcatcaaagataatgtttggatttttaccgccaagttccaaggcaatattcgtaacattattagcagcatttttcataatatgcttaccagtctcaatgccacctgtaaatgatacaaggtcaacctctttatgacctgacattacgtcaccaacttcagaacctgcacctagaataagattaattgttcctttagggaaaccaacttcttccattaattcaaaaacacgtattgttgttaatggtgtaatttcacttggtttcataactagtgaacaacccgtagcaagcgctggcgcaattttccatgatgcttgtaataacggataattccaaggtgtaatttgtgtaactacacctactggttctttaacaattttgctttctgtatctggaattggtgaatcaatcatttcgccaccgtctttatctgctaatccagcaaaatacataaacacattatgaatatcatccatatctgcatatgattcttctaacgtttttccagtatctaatgtttctaatcgtgctaacgcttcgcgatgttctttaatcttgtccgcgatggcacgtacttttttacctcttgtttcagcagtttcttgcgaccattcaccagactcaaacgcacgtcttgcagctaagattgcacgttctgcatcctcttttgtcccttcagaaaccgtaaatatcacttcttgattgtaaggattgataatatctcttgtatttttattcgcgctttcaacccactcaccatcaatatattgacgctgagataaatgttttaaaagttccattcaacaacctccgttaaatttgttaaatttttatttaacgaattttacaaacttatgttagcatagaaatgaaaaatgtgtcaatttacaaaacaactcaagaattaagttttgtaagttcgttagatttttatttaacgaaacatttaactttaatgctttaaatatttttaatgtctttttttagaaaaggttttataatgtattagtatttattttaacgtgaccaaaatgatgtacggaggtgcaatgatgactcgttctcagaacaaacagcaacaattagaacaagcaaaagatattgtaattaattcaattggacagacaatggatttgtatggcactaatagaagtgtaggaaacttatatggcacaatggtgtttgaaggcagtatgacgcttgatgaaatgcgtcatcaattgcaaatgagcaaaccaagtatgagtgctggcgttaagaaattgcaggaatttgatattgttaaacaacaatttacgagaggaagccgcaaacaacattttatcgccgagaaagactttttcatctttttccgaaactttttcactaaaaaattccagcgtgaaattgacatcaatgtcgaagcagtaaaagatgctcaagctattatcaatccattacttgaaagcagtgatttaactgaagctgaaacacaagaggcacaaaaaattaaagctcagcttgatcatacacatgtttattacgaatggttagaacagttaaccgaagcgattgaaagcggtgaaattttcaaatatttcccaattccagaacagccttctgattctgaaaattaaaattgactcaaacaacgacaatgatgattatgcatgataaaaacaatgcaataggtccacgaaataaacggtaatttctatctcaataaatagaaattaccgtttttgttttatatgacaatcaattatggaggtattttctagggctttcttagattcgttacattgcttcgccaatatatttcaattagctattctcgccctcacgtactctatcaataatattttgtatttgttcacgtttttcatattcattttctacaaaataaactaacggttcatctttgatagtaacccaaggtacaagtacatcaaaatctaattctttaaccatctctaaactttgaatagatttttctctatcacttgaacctaatataactgtacgccatctcttcccttcaaaacatataaaatctccagtaaataagtaacggtgatgaccatcatcccataaaaatagtgtcgtccctggtgtatgtccaggcgcgggaataacttctaaatccttatccaacattacacgattactaaattgtttttgaacagaaatcttatgtttcagtgcagccacatcattttcatgtataaagtaaggggcttcaacttgattagaacctcctatagattcatgatcatgattcatcaatacttttgaaacaccacctaatgatgcaatgtcttgttgggagtcacctaagtgtccggaatgatagataacaatattacctgtttcacgttttaaaataaaagatttaaatagaaatcgattatcaaaaggcagttccgaagtaggtgtcgcatataagttttttgtgatggattctaaactgtcatgtaatttggactgtttatttttaaattgattagtcattttatttcatccttcgattaatttgaattgtacatacgcagtaccctttatttaatttaataatcaatgagagtctttcaaacttcgatttagaatatgcttcatacaataaataagtacttggagcactaaaaaattaaatcttttagtacaacattaatgaaaacctaaaagttcatcctacaatgctactaaaaaaaggggaatggaacagaaatgatattttcacaaaattcatttcgtcgtcccagacccgctttgaattataaattatcgtcttgttcttcttctgatacttgaacgattcgcaatgaacgacgttcaacttcttttaatttttcagcacgcgtttcaagtttaattctatcgcgccctaaaatgattaaaaatgatatcatcatgaaaataaaaataacaattaatggcacacttgccagtattgaagcagttttcaatacttctaatgcacgttcaccaccaactagcatcaatgaaaatggcaataagcacaatgcaaatgcccagaataaacgattggcacgtaatggttcgcctaccacttttttctgagatgctgccgctaaaatatatgaacccgaatcaaatgttgttgctaagaataagaaagcagatactaagaatagtacaatcatcaatgatgggaatggtaaatgatgcaccacttcaataatggttgcctctgtaccatgtgtatttaaatattgtgttacattaaactgtccagaaatttgtaaatacacagcatagttaccaaaaataccaaagaataatacgcatccaagcgttccataaataattgttcctagcacgacttctttaaggcgtcgaccttttgaaattctagcgataaataaaccgataaatggcgcatatactaaccaccatgaccagtagaatattgtccagtcttgtgggaaattcgtttcttttcgacctttaataccaccgaatggttctaaccatgttgccatatgaaagaaatctctcaacatatttccgaaccctgtcactgtcgtttccataataaaaacagtcggtccaataataaatataaaggctaaaagtacaaaggatagccaaacgttgatatcacttaacttttgaataccttttttcaatcctgtatatgaactaatggcaaatataaccgtgattgttaataaaatggccgaacgtaaaatcatatttttaccatctaaaccagttaatctttctatgcctgcagaaattaatggcacacctaacgctagtgatgttgccgcaccacctagcaatccaaagataaataagatatctacaactttacctacaaatttatctgtttgaccttttaaaatcggacgacaagcttgactaattttatacaccggttgttttttaacaaatactaaataaccaattggtaatgctggtagaacataaatagcccaagcaattggcccccagtggaacataccatattgcgtcgcatattggagtgcttcatcactcatacttttcgcgccatttggtggaacttgatagtaaaaagcccattcaataacgccccagtataaaatatcagagcctatgcctgcacaaaacagcattgccgcccatgtaaatgtattaaattctggtttatcacttgctttaccaagtgtgacattaccatatttaccaaatgcgatatacattacaaagcaaaaaatcgccagccccataaataaatatatcgaaccaattgaatcagaaatggcactattaataccagtgatgatatcttcacttgcttttggaaaagccatcataggtataactgcaaaaagaagtacagctactgtccctataaaggtcgtccagtccataactttctcttttttcaattgtgctccccctaattattaattttatgaatcctgtttcgatttatctcaaaatgtaataattatattgattcacaaaattgacaataactaacatttaataataatgcaaatttcatacaatttgaaacttggcaattattgaatatttatataatttttcccgtaataaacaaaaccttaatagcgctaaaataacagtgttaagttacgatttaacgaatttaacaaattttactagaatggcatttaagaatatttatacgttattaacgaatatttatttattgtaaaacgctaccaaaaagttagacttccttcccactaaaataccacttttctctttcaacttttttaaaaaacggatatgcaacttttagtattggtatcaaaatgattgttaggtcatattctatcaatatatttttataaagaattgcttttattaactttcaattatgtacctaacctaaaaagaagccaaggcaacgaatgttaccttgacttctaatacatattcaactaactatatattcaatcatacgcgcatgcgagagtgattgttgtacatctataatgcgttgatttaaagaacctttatatggtaaatcaggtttgaataagtgttgtataaatagaccatctactaaaacgtcaatgtatgataataactctcgacgttctgtacaatcatttgctaaatattcatataaaaatccagtccatacccaaattgtctttgtatttccaaaacgtgctcgaaatgctttgacaagatttaatgtaatatccaaattacaaaatggttcgccacctaatagacttagcccagatatataatcatgatcgcaatcatctaatatttctgctaatatttcatcagtgtatttctcgccatatctgaacttttgtgaggctttgttataacatccaacacaattaaatggacatcctgatacataaacactgcatcttactccttcaccgtcaacaaagctatttgattctattttagcaatataaccttgtccttgtttaatgtctaaaagtatcattctttaggcgctttcatatgttttactcgtgcgcaaatttctttatgacggcctttaattactggacgttgaactggattgcctaggtaaccacatgttcgtttaacgacatcaactgttttaggattatcattgccacagttcgggcatttaaatcctttttcagttgcttcaaaatctccatcgtaatcacattcataacaatgatcaatcggaatatttgtacctaagtaaccaactttgtcataagagtagtcccataccgcttctagtgctttcaaattgtgttgcaatttcggatactcacaatagtgaatgaaaccaccactcgcataataaggataatctttttcaaaatctaacttttcaaaaggtgtaacatctttacgtacatcataatggaaagagttttgataatatcctttatctgtaatgtctttaatatctccaaatctctcttggtctaaacgacaaaaacgatccgttagcgattcactcggcgtactgtaaatactgaaccaaatgtcatataattctgtccatttcgtttgataacgtttcatttctttaagaatttcaagcgtaaatgcttttgcttcttgagatgtttcccagtctggaccatagaaaacagtagctgtttcatacaaccctatatagcccattgaaatcgttgcacgtttatttttaaataactcagcaacatcatctgtttcttttaatttatagttaaatgcgccacttttatataaaatcggtgcgttattcggtacagcatctttcaaacgatttatacgataaagtaatgcatcatgtaacacatcgatacgttcataaaagatttcccagaatttcgtcatattaccggcagattctaatgccattctaggtaaattaagtgtaacaacaccaagattacaacgaccattattttcaaaatgaccttccgcatctttccaacttggtaaaaatgaacgacaacccattggcgctttgaaatcacctaatatttctacgagtttgtcataatttaaaatatctggatacatacgtttcgttgaacactttaatgctagttgtttaatgtcatagttcggatcttgcggactaaagttggttccttttttaattgaaaatacaagtttcgggaaaatcgctgtcgtgcggtcttttcctaagcctttgatacgagtatttaagatagcttgttgaattttgcgacttaaatgatctgtacctaagccgaatcctaatgttacaaaaggtgtctgtccattagatgtatataaggtattaatttcatattctaaactttcaatcgcatcattgatgtctttagtgacttgttgatcaacataacgatcaatttcagattctttgacaaattgctttgcgatattcctatgttgttcttcattatgtcgtgcatatgtactaagtaattcgtcaacgcggtcaaccgtacagccaccatattgactgctagaaacattggctataatttgtacaagctgcgctgatgcagtttgtattgattttggtgaagttacattcgcgttgcctatttcaaatccattatgtagcatatttttagcatctattaaacaacagttagttaacggttggaatggatgataatctaagtcgtgaaaatgtatgtcccctctttgatgtgcatctgcaacgtgctttggtaataaatgatttaatgcgtaagatttagaaacgatacctgctgttaaatctctcattgttgaaaatgtatcactatctttgttagcattttcgttaacaatagcaggatctttagaaatcaaacccgttaatgcttcttcgatttgattcattttaccccttcttcctatatattgtgtctactcattacgttataccactatatatagtattttcaaatttttattagtctgttaactaaaacgtcacaaagttattaacatttagtgaaattcatatttctacacaattatttcattaatttttaaaattgtttaaagattcgtccgtcatttcgacatgtttatgcaactattatttcattttgcaacgtgaccatagtttctattttttcatacttaaatcgtcacaatgcccatcaacattgcaattactaacataacgatagcgaatccccaaatccaaaagaatgcatacttaatatacgtgcccatgtttgcctctgctaaaccaattgccaaccataaggctggtgaaaatgggctgacaaatgtacctataatattccctatgaccattgaataagctgttgatacagacggtacaccaaattgccctgctgtttgttcgacaatcggtaacacagcaaaataataagcgtctgtgctagttagtaaatctaatggtacgccaagtaaacctacaataatatgcaagtatggtcctacttctgcaggaatcactttgattaaattggtcgcaatcgctttaagcataccggtttcatttagtacacctaaaaacatacctgctgcaataatcactgcagccatcattaatgcattcggcgcatgcgctcttaatcgttccatttgttcatccactgatttaaaattaataacaagtgccaacgaaacacctatcatgaatgcaaattcaggtggcgcaatatttattaacatcgatagaataacagctaaagttaaagctgtattcacccattttatccatgattttgttcttgcacgtccttttacaggaaaccttacatcttgatctcgttcatatacttcaactaatttatgtacatctatatcttgtgtttgcggtaattcatttctctctattgcttttttgatacgtttctgttctttaaatccaagatataccgcaaacaacataacaagaatgaaacctattatttgaataggtattaatccataccataattcattgacacttttggcttttaacactgcagctacacgagccattggacctccccaaggtaccatgttcataatcgccgcgcttaatgctaatagtaaaatcaataaatatttattcatatttaacgctttatataaaggtaataatgcaggaatagaaagcaaaaatgttaccgcaccggccccatctaattgggctattgtgccaattaaagctgtcattgcacagacaatgacgacattgcctcgtgtcattaatattaagcgtttgacaagcggcttgaataaaccactatcgttcatgatgccaaagaaaataatggcaaagataaacataataacaacgttgatgacttgatctaaccctttagcaaaaaatccaaccaaatctgtcacactatatcctaaaatcattgcccctaagcaaggtatgattgtcatacctacaactggatttatctttttggcaatgagtaaacctacaattgaaataataataatgagccccattactgttaaccacatattatcactattcatattattttctccctccacttttaatacaatttacataatccccctctttaacttaaatattataattaatataattttttatatttaagttatctcattttatcaaaaaaatcttttttgcgtaactatcaatagtgaagtttgattttcctacttgataacatggcatgactaatccttgtatatcctgtcctgtatttcattttgatctatcatttttattattgctttctattgcacaaaaaatctggctaaaggtcgctatgatagtaacgacttcaaccagatttcaatttatccacctattttattaagtttgttctacgtatctttttctctattgtaatattcatatttaaaacgcatatcattatcgcttaaatccttcattattagactattcacaaagccgcccatgtcttaatttcaatgattaagcgttaaagttaaaataagaagacttaccttagacggttagacggtccgctattattatcttacatccaaccacgctaaaaattgagcttgtttgtcatgatttaaatattcttgtgacacaatttgtgacagtaactgttgcttttcgttatatgttatatcaagtacttttattttctgtcggcaagtatataaaaagtcgatatacgaactgtatgatggtggatataacgcctcaagctctgccataattgattttgtcaacttaggactcgcaccatcagttgatacactgatagttagcttgtcgcggtgtagtgcacttggaaatacaacattgccatttgatgcatctccaacattattaaaaagggcatgctcaggtaaggctttttttaccgcttcattgacacgtggctcattggttgctgcaataactagatacgcgtctacaatatcgcttggttcaaattctttttctttccatatgacgacaccgttatctaccatattttgaagtttttcagtgattgtcggactgatgaccgtcatatgttcaacgtattgatttaatgtttgtgcccgacgacttgcaacgacgcctccaccaactatgacgacatttttatttgttaaatctatcattaatggcatattcatgttgagcaacatcctttatatctttttacatcattacaccttaaaatatttaacaccaatcgctaataaacatcacgttgatagcgttgttgttgtttcatttgtcgcaataataactctgcttcttcttgagaaatatgacgttcttttaccaatacatctttaatggcttgatggacatctttcgccatacatttttcatcgccacaaatatagattgctgcgccttgctcaatccattcattgaaacgtttactttcttccattatacgatgctgtacatattctttgtgttcttggtctcttgaaaatgctaaatctacgcgtgttaagtttccattttcaagccattcttctatttcttcttcatataaaaagtcagaactacggtgttgatcaccaaagaacaaccatgtttttccagtcataccaagttcttcacgttcttgtaaatatgctctaaaaggagcaattccagtacctggtccaatcataataaccggtatatcttgcttcatcggaaatttgaagttcggatttttcttcaaataaattggtactatatcgcctggtttaattcgctcagcaaaatgaaccgagcatacaccttttctctcacgtccatgtgcttgataacgaaccgtaccaacggtaatatgcacttcatctggcgttgccataaaactactagaaatcgaatactctcttggtggtaattttctaaggatttgatacatattctcaggttgtaattctatagttggaaaatctgttattaaatctataaagtcccgatttataacatattcacgcgcccatgactcatcttgaatacgttcagataattcttcattgtcaaaatagatatctgcatttttcaataatggcaatgttaatttagtaaattcaaaatgtgatgttagtgcttcaacaataggaactgtatcaccatgatcattaattggcaccggagattgcggatcccaacctaacatggatattagtttttcaaccaattcagggtcgttttgcggtaatgctactatacaatctcctggttcatatgattcactaaaatcatcaagtaaaaattctatatgtcgtgtttctttatttgaatcggtaccatttaaattgatattcgctaatacttctgcttggtatggatttgatttagaatatttcttttctttggcagacttaattgattcacttatcaccgattcactttgaataccttctgatgtggtatcaataatattaatgatgtctgccatccacttttctgcgtcttcttcataatcaatatcacaatctacacgcttacatatacgctcagcgcctagattttctagtaaaacatctacatctttaccggcttgacagaaaaattcatatgtttgatcacctaaagctagtactgaatatctcacatgatttaaattaggtgcgttatcgtcttctaaaaattcaaagaaatcccatgcattatcaggcggttctccttcaccatgagtagacgtaataataaataaatcttctaactgcgcgatgtttgtcgtatcatattcatccattgacatcaaaacaacttgatgtccgatatcacttaaacgttctgaaaaaatttcagctaaacgcatggcattacctgattcagaaccatatagcactgtaacatgccgctgattagcttcgatatgtggctctttattttgtaacatatacgttgttgaagttgcttgttcttctgatatttgtgattgttgccacacttctgtctctaattgttgttgattactatcacttgtcgtatcgttactattagctagtaaaaaaccactaagccactgttgttggctctctgttaatgtttgcagcagattgttaatctctgtgacttgtttttctgtaaatggactattagatgtatttaatttcaaatgttttcacctcaataaacttgaaatagatgattgactctttttttatcgatagtttagtcaattttttaatatgtatggtataaattaaaacaaacttgagttgtgtctgatagttatacttgcaaatatttacaaccttcatgttgcttgaatgacattatcagtaattcagacaaaactttgattatgtcgtgtcagttattaatgcatacagtaatgcatcgttgttattttttatttatttactatttattatgtaccaaatcagcctttcagtaaaataggtcaaattactgattttctaaatataaaatgcctcctaataacatactattagtacatcattaagaggctcttgtgttatttgcatactaagcgctcaaatttaaatttaagatgaagattcttgcaataatatttctatatttgtcgatatatccaatggatcttccattggcaagaatcgatttacaacatttccttgtcgatcgattataaattttgtgaaattccattttattggggacccaaagattcctggttgttcattctttaaatgcgtaaataacggatgttcatcgttcccgttcacagatattttagctaacactggaaatgttacaccaaatttctcacgactaattttcaagatttcttcattagaacctggttgtcgattgtcaaaattattattcggaaaactcaacactacaaacccacgatccttatatttttgaaataaagtctctagttttttcaattgttcgctatatatacattctgttgcagtattaacaactaaaatcactttacctctaaatgcttctaatttataagttaagcctttataatcacttacttcgatatcatacacatttctattattcataagacacccctacacagccttttttatattgaatatgttctttttagaatgttctgataaaataagtgcgcgtttacaccgtgaacacacattatatagcgtgatacatttttcgagcacacgataaataatgttcgagtttatgttgttgctcaacctatccgatttaccgtcttttttcacctgtcttactttattaaaataatcacattgtatagctgtattagtccagctacaatatcttccgttataacccctcattataatcatccttattttctatttttaaaaagacaattagaccgctctttaaactatagattaatacttaagttaaactcatacatactgataccatacgttagatctaacaatttaaaattcgttataactatggattaaagagctgcccaactcatataatccttaaaaacttcacatgtgattgtttattaagccctcctttatcttattaaatatccttataacccttttaaaattaaactgacacactcatacattgttacacgcgacgataaacgtcatattattgcatatcattaaaacaagtcactttgtatcgtgtgcgaccgaatacatattaaatcatcaataatgattattcaattattaaaaataaaaacgaacattctatatagagtttctacttattgttttttcagcattgtctacattacttaacattcgtgtttgtaagtaatattgaccgccaatatttagacactttataagtatgccattcatcatttttaatcatattatttttcttattgatatttctattcatatatttctgattgtatatttagatataataatttgttattggaaaatatatgaaacaaatttgactcatctttttcaatatctaaatgacacgatgcatgattttttaattttgtaattaacttccttttaaattagactgaattgtgacaattttcaaacattttaatgtgtaaatcattggcaaaatatacgaattgcatttaaatcgtcaatttacatatatttttgcgtagtaatcaatcgttatcattgttatttatcgttacattatttcgagtatcagtatgtatttcgggcttcgtttgataacgacatttctttgtgacatcgcttcatcagtgtaacaacaaatacaatgatttcgtgatgttagttacccattttatgtgttgcataaaatatgttgttataaaacattttaaatcattttatataaacaatctatatatttttggcatttccaaaatatcacttgttatattaaaaaccgacaagacattttatcttatcggttgaaatttgttattgttatttgtaatgtttttaggtttctttttaatataatatatttcagtgaaaatacatgattgattgtgatttcactgaaacatggttaattgcgttgttgatgaataactttagcataaatataggaagttattttgtacatcgccatatatagaaacgaaattataatgacagctagtacgtaacttgttaaaaatatatgatggttattaatacctatcatatttagtaacgtatatacaatgttactagaaattaatgtgtgaatcagtgctactgttattggtattgcgaacaagaaagtcatttgatttcgtgttatctttgctattcttccattatctaaaccaagttttttcataatgtcataattgtgctgatttgcataggcttctgagacttgtttataatacatcattagaaatattccaatgacaagtacaattgatactacgccacctacaaatattagtccacctgtcaaacgatcccaaaccattagcatttctgatttagaatttattgacgcatcgtattttttcgatagcttttgtatttgtgatgttgttaatttcgtctttccaaatacattaaagtttatcgatattgtcgaattcttttgttcatgtgcataaaatccttttactttttgtaattgattgttatctttaacaattaaaaccatactatcttgaatcatcatcaaatttaacgcatgtgcgtcaagttgtttcactttaaagacttcattattaagaccgaccttagactgctttttaaaaataggtacattcgtaatcatacctatactttgattgtctaagtgtaatttgttttggtgatatcgattataatcttgtgcagtaaaagctgtaatcattactgattgtcttgaaaatatcgcgccttcattaccaatgaagtctattggaatatcatcactagcctgttttaacttgtaataagcacgattcttttctaaagaagctctaaataatgtcgtttcatatactttgaagtcttttgcattaaccgaaccctgtatatcacgtttaatattctcaattgtttgttgacgttctatttgtgacttagaattgtcgctaaatgacaaatcataatcattcgtaatcaatttcgtaatggtatgattcatatcacgataggttgttaatgtcattgtgagcgttacaatcaaaaatgtacacagcaaagtgattgttgcaagactgactgcattcattttaagacgtacacgcatcccaactaccacaaaaaaataccgtggatgatagtaaacttttgatacctgctgcaatatactaataattatttcacttatacctacaaaaaatgcataagtaccgataataactaatcctatgacaatccatattttaaaaaaggcaccaaacgtcgtatcttgttgtaatgcaataaagtaacctaaatatagtgctgcgcttcctataacaattaaaacgtaacgcaaccatcgtgatatgacactagaatcggaacgatgttgataagttatcggccgttgaaaattaatactaaacaagttgaatataagtagcatgcccattaatacagcaatgataatcaaagtaataaacatcgctacagagtcaaatggataataccttaacgtcgcaacttcactgcccattattttctgtataaacaagaaaaatatcgcaccaagtaagtatccgccggcaatactaacgactgaaattatcacaaattgtaagatagtttccatcactacaattaaacgcatacttttcttggtcatgcccaatgtcataaaaatgctaaactcttttcgtctttgtgacatcataaagtgatttgcatagaaaataaaaataaaagttaaaagcgccataaaaaaattagctatgataataaatggtactaggaagtcattcttctgttttatgtagctatttaacccaattgacacaagcgtatattcaatcatgaatagtacacttaccgctaaaatgaatggaatgattacaagtcgctgcgtaataaattgacgtcgcactatgtgccataacaatcttaacttcatatattgacacttcctccattcacaagtgctaagctatctgttattcgttgttgaaaagctaattgactttcttcaccacgatatatttcatgatatagacgcccatctttaataaaaatgactcgctctgcataagacgcatcgatatttgaatgagttaccattaaaattgtctgttccaattgatgaatctcttgaaataacatcatcaatgcctttgatgtttttgaatcaagtgcacctgtaggttcatcggctagtaaaatcgtcggcttagtaactaatgcacgtgcaatggcaatgcgttgcttctgacccccagagatttcagaaggatacttgtttaagaatccctctaaatgtaattgtactgccaactgatgtaccctttgttctatatcttttcgtttagcaccagctaaaattaatggcatcattatattttctttattcgtcattgttggtaaaagattaaaatcttgaaaaacaaaacctaccatttgttgacgatacaatgctttacttttatttttcatattatttaaatgtgcgccatccacaataatgtcaccttcagttagtccatcaaaagaagcaattaaatttagtagtgtagacttccctgacccagactcacccataattgcaacaaattcaccagctccaactgataaattcatttgattaagtgctgtcgtagcattcaaacctttaccataaaccttttttacatgtttcacttctagcaacatggcatgcacctcatttctttgttagttctatattaaaacaaaaaaatactaataacatttaaattagtaaaaaaatgttactagtatacttacaatattgaaagtttttattcatctggaaattgaatcgtaaatgttgtaccctcattttgtttagatacgactgaaacaggatggtttgtgtgtgttgaaatttgttttacgataaataaaccaatcccacttgagttactttggcgctggccattataacctgaatagcccttatcaaatattttaggcaagtccgcttcactaataccgataccattatcttttacgtgtaattgattggattgctcatcaaattcaatccatatatctttacctctcgcatacttaagtgcattatttattaattgttctatcattaaagaggtccatctaacgtcagttaatacttcgtgatgacaaggttcataatggatttttgttttttgatcaataaactgtattgaatatttcataataattgggcgaatgatattattaatcgaaattttagtgacagaaatatcagaagtttcatttaataactttaaataactaagtgctaaacttgtatagttatcaatttgaataacctcttgacgaacacgattaacaacattaggctcatctctttcaagtaacagttgtgctgcagtaatgggtgttttcatttgatgtacccatgttaaaaagtagctctctacatcatttttatattcaatttgttcatttttaagctgatacaacgcattttctaagttttcaatttgttgttgttggcttatagtttttacaaaacttaaatatttaatacctatgaatatgagtaataataataaaataacgccaagtgctagtaaatatgcttctaatggcaaatgatacaggtaaaacattaagccaaacaaagcaaaaataactatgactattgctatttcctgagtaatacttttaagaaaggtcattgcattcaccctatactttatatccgacatttttctttgtaatgataaaatcattaacgccaatagtatttaattttttacgcaggcgcgtcatgttaacagctaatgtgttatcatctatgaagttttctgattcccaacatttttcaattaaagcagttctacttacatatttatcttcattttgaaataataactttaatatttgtaattcagtcaaagatagctgtatgttttgttcttgatacacgacttttgcttcatctaatattaatgtacaacctttaaccgtcaatgaatcattagctactgacaagtcataagttcgtctcaataatgcttgaattttggcaatcgttaatgacaagttaaatggcttttcgataaaatcatctcccccccatttgtattgccataatttggtccatattatcaatacgggaactaataaatataattggcacattagatgtttttcggatttcttgacaccaatgaaaaccatttaacgttggcaaattaatatctagcaatacaagctgaggttgattttggttaaagatagacagtatatcatcaaattgttcaacgacaataacaccgtaattccattttttaagttcagatgctaaactctctgctataacaaaatcatcttcaacaattaatattttcatctataatcttcttccttcaattgaattatcctttgttatctttttgttctttatcctgctgcaatgacggctcttgatttgaactttccgtgtcatttgtattttgatttagtgtatttgctttttctttctcgagttgctttttcttcgtacgtttacgctcttctaaaatagacaacactataaagaatatgattaataatggagataacattactagtatcatttttccacctcaaattatatttaattctatattttcacacgcttctattctaacgctttctataacaaattgtcatatatattcattttttgttattctaaatcactctgtttacatatttttaactaaaactacataattgctcaaaattcctcttttacactgaagacatagtcatatactcaggaggatgtcttatgttatcagttaaaaaagccacaaaatttgcagttgctaaccttattatcgtgtcaacggtttttagttctgtcacacctgcaattgcgcaatccgataaaagttctaaagatgaaagtttcgcggttggtaatactaaaaatccaaaaaatgttatctttttagttggcgatggcatgggtccatcatttaacacagcttatcgttattataaaaatgatccgcatgctaaagaaatgacccctactgcttttgattcatatttaaaaggcacaaatcgtacatattcaaatgacccaaaacagaatattactgattctgcagctggcggaacagcctttagttctggtcataagacatataatggtgccatcggtgttgacagtaacaagcagaaagtaaagacggtgcttgaacgtgcaaaagaaaaaggtaagtcgactggtcttgtttcaacagctgaattaacagatgcaacaccagcagcatatgctgcacacgtgacttctagagatgataaaaacgaaatcgctaaacaattttataaagataaaatcaacggaaagcataaagttgatgttttattaggcggcggcgctaaatatttcggtaaaagtaatggcaatttagataaaaaattcaaaaaagatggttacgaccttgccacgaacagtaaggagttatcaaaatctgataaagataaagttcttggtttgtttgcagataaaaatatgccacttgcaatagatgcttctaaagacgaaccatcattagctgatatgcaacaaagtgcacttagtaagcttgagcgcaataaaaaaggattctttttaatggtcgaaggtgcttctatagataaatcagcgcattccaacgatattacaggcgttatgtctgaaatggaaggttttgaaaaagcattcgatgacgccattcaatatgctaagaaacataaagatacacttgtcgttgcaacagcagatcactctactggtggtctaacaattggtaaagataaaggatacgaatggaatcctcaaccgattaaatctatgaaacactctggatcatatatgacagaaaaaatggctaaaggtgaagaccctgaaaaagttattaatgaaggttatggatttgaattttcacaagatgatatgaaaaaggttaaaaaagagaataaaaagctaaaaagactacttaaaaaagaaaaagacgaaaaatccgcagaagtagaaacgcaaacaaaagccctacaacacgctattcagaagccagtaaatgataaatcttatacagggtggacttccgatggacatacaggcgaggatgttaatacctacgcttacggacctagatcagaatcatttagtggtaatatcgaaaatacagaaagcgcaaaaataatatttgatatattcaagtaaagcataaaaaaattcccgagcactataacaaggtgttcgggaattttttatggtttaatttagtactcaatgttaggtgcttggttaacacgttcttggtattttttaaatgcgaagtataaaccgccaactaatgttaaaataactgctaattttttcatcattcaaactcctttctaagatgtgttgaaactgagttcaattaaattatatgtttttattatacactttttgacatattttttaaatttaagaatgcgaagatttttaacatttctgatgctagctttctttttcatctttcaaatgcttaataaaatcaaagccaggtcgccctttagccaatgcttccatcacatcataccaatccgaaccgacttgttgatatatattttgcaataattcatcttgcgccttgttcaattcagcaatgagttgatcgcctttatccgtcgaatataattttttgacacgtcgatcagtctctaaaactttttcaataatgagaccttgctcttttaatttttgaagtgttgcatgtgatccttgtttagaaatttctaatatttctagtaatgatttaatagtaataccaggtaatttattgataaaaaacaaaaaacgatgatgctgacgactcataccatacttctctataatttcatcagcggtagtaataaaggttttatatgcaaaataaaacaacatatgctcataatcgtttttattggtcgacatgatgatgactcctttcaaagcgttaacctcattataataaaatttataatgtaagtcatacaaatgatgataaaactataagctaaatctaagtttcacgagaaacatttttgtgtatcagcaaattgcgccaatcatattaatacaaaaataatttaaacacttagaaatgttagtcgtgcgtaaatagtttgtatctctcactctgtgtatttaatgcagccacatattttccaagaaataattaatcattcaccatccatgttatagcacgcttaatcgcttgatcccaatatgcataatcatgatctcctggtccatcttcaaattgataaggaacatttatgcgtgataaataatcgataaaatctaagttgtcttgatataaaaagtcttgtttaccacacataatgagcaattttggaatttgtttatcttcagctacagctttgtctagcaagtaatacggatcatgttcagttcctttaacacttgaaagattgccaattatggcctcttttgaaaaatcattccactctagatccattaaattttgcgcttcaaacacagcagataatggtacagctttggcaaatttatccccttgtgttaatgcaaatttaattgtgccatatcctcccatagagtgacctgctataaaattgtcatcacgctttttggaaagtggaaatatttgatgaacataatcatacacttccaaaatataatcataatagctatgaccatatgccatgttagcatatgcgctatgatccacattgggcataatcacagctaatttgtgttcattcgcatacctttctatgcttgtatatctcatatatgtcgtttcatcacttgataatccatgtaacaacattaaagtttttaatggtttaacagttgtatcgctattaaagaagctttgatcttccggtaaaatgactgtcaaattttgatgcataccaattgttggtgaatgatagtttaatgaaatataagccatacgtcatgacccctttctaattctactttatcaacattttacgcttaatcaattcactttaaaatcattttcaacaaaaaaaccgaatacaaatgtattcggcctaaaaaagtatttacgctttttctttatgatcttgcttgcgttttctaaacaatagtaatgatcctaataatgccatcattgcaccaaataaagttgcatttgtgttttcgctcttatctcctgtttctggtaaagcatcagttttgtgttgttttgataccttattagaatggtttacttcacctttaggatttgatggtgctttctgttcattatttggtggtgtaactcttgaatcggagtcactatctgagtctgagtcgctatctgaatccgagtcgctatccgagtctgagtcgctatctgagtctgaatcgctgtctgagtctgagtcgctatccgagtctgagtcgctgtctgaatctgaatcactgtctgaatccgaatcgctatctgaatctgaatcgctatccgagtctgagtcgctgtctgaatctgaatcgctgtctgagtccgaatcgctatctgaatctgagtcgctgtctgagtctgaatcgctatctgaatctgagtcgctatctgagtctgagtcgctgtctgagtctgagtcgctgtctgagtctgaatcgctatctgaatctgagtcgctgtctgagtctgagtcgctatctgagtctgagtcgctgtctgaatctgagtcgctgtctgaatctgaatcgctgtctgagtctgaatcgctatctgagtctgaatcgctatctgagtctgaatcactgtctgagtccgagtcactgtctgaatctgactcactatctgattctgagtcgctatctgattctgagtcgctgtctgaatctgaatcactgtctgaatccgaatcgctatctgattctgagtcgctatctgaacctgagtcgctgtctgagcctgagtcactgtctgaatccgaatccggatccgggtctgggcttggttccggttctgggtctggacttggttctggatctggcgttggttctggttctgggtctggacttggttctgggtcaaccggcggccctggagttgggtctttcggatttactgctgaatcaccatcagcacttccaccaccataacgtacaacattctcattattccaaccgaaaatactgtagtctctatttgttacaggatcaacattttcttgaataacctgagtttttaagttcttacctgtattgtcgtaatgcccttctactaatactacatatgttttagtaatatcaccaaatttaatactagctacatttggatgctcataatagattctatttttaaattggtctgttacttctttaaggttagagtcatttggatctgcatagtagctatctgataatttagatgtatcattcacttcaaaaattctcagttttgtatctgtagcacttactttaccgctactttcttcgattttatcttggtagcctttaatatacacccacgtattacctaaaactcgttgcttagggttaacaaatactgtttgcttgtatgtgttttgacctgaagctgtatctacaccaataatttgagaagaaatgttcgcgccatttggtttatcaattcctgcaattggcgaactatagttataagtaattttattattaaacatttcatccgcaatattaatattcgcatcatatgttcctgatttaggtgcctttgctcggtctgtaaataaaggtaatgaaaattgtccgttaatattttctttattatttacataatctgtaaagacaaatgtatacgtcttagtcaagatatcatatgttgctttagctacaacatcgccattcgtacttttaatgtctgcaattggcatcgtattatttgaattagaataatccacgtctccattaccagttaaactatctggtaacttcgctgtaaaataatcccctgatttcactttatctgtcactgtaaaatttgccgccataaatgtgttaccactttgattagggtcaaatgtagtcttttctaacttgaaattacttgccgtaactttatcatttacatttgtacctttagcatcagcagcatttactaccggttcagcaacagctaaactacgtacagctctcgttctaacacttggtttactagttccttgcgcattggaaatcgtttgtggtgatgattgtggtaaatctaatgtttgagaatttttaagctcactgtttgttgctatgctattagcatcattcgttgttttattatctacttgagaatttgcttcttgaggaacagtttgatcttgcatttttgcagcagttgcttgatttttaattgccgtcggttgaggtgtttcatttgttgaagctggctctgttgtagtggtattgctcgtttgtgtagacattggttttgttgtgctatctacattcgcactgtttgtgtttgcactaatatcagatgtatcattagccgttgtatttaattgaggtgtttctatcatattgtttttttcggaatctgcacttgcattatttttcgaagattgcgttgtatcgttcgattgttctgaagcttgtgcttgatgattgcctatcccaaatagtatagttgcccctactattactgatgtggtacctactgtaaaacgtctaatcgaatacttattctgcttattcgacaaataatcaattctttttttcaaaaatattactccatttcaatttctagattagtctaaattgtataatgaaataagaattatatcaattgcttttcgaaaaaaattacgtaaaatttgttttcttcctatttatataacttaaaattttctgttaactagcaaaaatcaatatactatttttacactattacaaattttttacttttcaaaaacttagaagttctaaatttttcatcaccttaaattttactgtaatttcaacaatcaaatttaactaacattttaaattattcatcatgctagcaaaaaaggcctaacgtataaatgtacgttagacctcatgttcaacttattcattttacattgtatattaaacacatacatcattgaataaatgtttgcttactaaccaatttttatgatctttaacaacaagtttttcatctttaagttcatgaataatatgaccagctgtttcccgggaaatcccagccatatcactcatgagttgaatagttaaaaactgtttgatttcataaaattcatcttgatcgtatcctactgtctgacatagatggcatatcaatttgataattcgatctttagcaaatttacttgttaatgccatgttatagttcatgtgttgctgctcattatcatttattaatgcaaaaagtgtcaaaaatatatcatcattagctttgcacaaaaaggccatcaattctctaggcaatccaagaactgtacaatcggttaatgctgtacacaattcgttaacctctttcggatgaaataagttactgattggaaataatacttgctctttattaaaataacgatatacatctccattttgattgtaatgttctctaataatgttaccttcaattaaaaagtaaatattgctactttcttgtggcgaaaaataaataacttggcctttcgtataatgtctgacaaaacattcactttgatatggttgtaatatactatatggtatattaatgtaatctgctaatgcctttagttcatgttctaatttattatttctacccaaaataaagttttctgtcataagttaaactccttcaaaccttgcaaagtgtcagcagacaactttttcatttgaatcaacggagaaacatatttaatgttttgtcgcgtgataaagtgctacatgtgaatgtgtgtacctttattaccaatcaaagcttcgtatgcctgctctaaattggtaatgataacttttttgttttccccactttcaacaaatcgtatcgcagcttctatttttggcaacatcgatccttccacaaacttaccttgtgccgcgtattttttcagtgttgctacatcaatatcatcgatttgttgttgattaggttcattaaagttaataaatacattttctacattcgtaagaatcattaaggtatctgcttcaatcagcgttgctaatttctcactagcaaaatctttatctataaccgcttcaacaccttcataggtattttctttttttataactggaataccgccaccaccgcatgcaatgacaatatttttaccgtctgctaaagttcgaattaactggtgttctagtatagattgaggtagtggtgacgcaactacttttctataaccacgtcctgcatcttctttaaagactgagtctggctgttctttttgtaattcttcaacttcttctttcgtataaaaaggaccaattggtttagttgggttatcaaatcgtggatcatctttatctacttccacacgtgtaacgattgtgcctacagttctatcactattcatttcagttaaaatgcgattgatttcagtttccaaccaatagcctatcataccctgtgacattgcaccacaagtatccaatggcattgccggcgttgtgtcactgttcgatttagcttgttggattaataaacttccaatttgtggaccattaccatgtgaaatgacaatacgcgctggtgaatcaaataaaggtttaaggttttgcatcgcacatctaatagctgtttgttgtgcttcagctgttgcttctgttgtctgtatcgcattaccgcctaatgcaatgacaattttctctttcatatttttgtcgctccttttaaaaaacatttatcgttcccatcaataacttaattaacccgataactgcaagtacgataataatcataaaaagaatatagtctgatttaatcaaacgtgtctgattattcttttgaacgattgtataaacaagaagagctggaatataaagtaacatcgtcaataataagtaattgatacctgctgcatatataagccatatagcataaattgaggctatgataccaatcgtccattgtttagtagttgcttgctgtcgatgctctaaagtgtatttaacttggtaaaatgcactgaacatgtaagggtataaaatagcacttgatgctagtgaaaatgcaaattgatacgcactctgtgtaaatagcatacttattaaaaataattgtactaatatattggtaataagcagtgcatttacaggtgctccatttttattttctttagcaaaccattttggaaataatccatcttttgcaacaatgaaaggtaattcaccagcaagcagtgtccatcctaaccatgcacctagtaccgaaataattaaaccaatatttacaagtgtagatccccaaccacctacaatagttgcaagcacctgtgccatacttggcgaatctaattgcgaaatatgattttgcaaaatcacgccttgagctaatacagttaataagaaatagataattaaaactgatataagtcctataaccgtggcactacctacatcttttttatttttagctctactagaaaaaattactgcaccttcgataccgataaacacccaaactgtcactagcatcgtacttttaacttggctcattgtgctcgcccaactaaatggcaatacaccctctgacgtcatactgaaaaagcctgttttaaaagtgtcaaaattgaatgcaattatcatgcatatgattacaagtaaaatcggtattaactttgcaacagtaacaatactattgataaatgctgctgtttcaacgccttttaaaatcaagaaatggacaccccagagtagtaacgaggcgacaataacacttggtaatgtgttgcctcctttaaaaatcgggaaaaagttacctactgctgacatcaatagtgttgcataggcaacattgcctaaaaacgctgagaaccaatatccccaagcactgataaatcctacaaaatcgccaaatcctgcttgagcataactataaataccaccgtctagctccggccgttcattggttaaattttgaaatacgaacgctaatgaaatcattcctatagctgtaataatccaaccaataataatggctaatccaccggctttaccgcccatatcagacattatattgaacgcaccgccaccaatcatggatcctataactagtccaattaaagaagatttactgagtttgttatctcctgattcgttcatattcatttctcctttaataccaatatgaggtgtctgtacatgacacttatatcatcagacacatcatattcatatcgttccatttagtgattaactccccaatgttgctgccattactgccttaattgtatgcattctattttcagcttgatcaaacacttttgaatgttcacttctaaagatttggtctgtaacttccatttcagctaatccatatttttcataaatttcttgtccataaagtgtatttgtatcatggaatgctggtaaacaatgtaagaatatcgttgaatctttacctgttaaatcaaacatctgttgattcacttgatagtcttttaataaattaatacgttgttcaaattcactttcttcacccatcgatacccaaacatctgtatatatagcatctgtattttcaactgcttctgcaatattatccgtaatcatgactgaaccaccatattgactcgctttttcttttgcaatatcaacatatgcctcttttggatttaatgatttaggtgtacaaattcttacattaacacctaacatagcacctgctaccattaatgaatgcgcaatattattacgtccatctccaacgtaagttaagtttattccttctagatatccaaaattctcttttattgtcataaaatcagctaacatttgtgtaggatgccaatcgtctgttaatccattccacaccggtacaccagagaacttcgctaaatcttcaacagcttgttgtgaaaaaccacggaattcaataccatcgaacattctacctaatactttcgcagtatcctctacagattcttttttgcctaattgaatatcattttttcctaaaaattctggatgcgcacctaaatcaatagacgcaactgtaaacgcagcacgcgttctcgtcgaattcttttcgaatagtagtgcaatattttttccagataagtagtgatgcttaataccgtttttcttatactcttttaatgtaattgcaaaatcaataagtccttcgaattctgctttggtaaaatcactttcttttaataatgatctgccttttaaatcatacggtttttgaatttctgtcattattttcaccctcgtttctataatttattacgttaaatgtcctctctgaataatggttgactcatacatctagggcccccacgtccacgtaccaactcgctaccagatatttcaatgactttaatgcctttttgtctcaataaatcattcgatacatagtttctatcgtaagtcactacaacgcctggtcttatacataatgtatttgagccatcattccattgctctctagcaccatcaatgacatcaccatttcctgttggaatgaattggatatcatctatacctagtacgtcttctaaagtatcttttaaatgactagattgtttgatggcaatatctttatttacgtcatcatattcaataataaatatattcatattgccttctgcctttaaaatggctgaatgcattgtaaatttgtcataatctatcattgtaaatactgtatctaagtgcataaaagttcgactagttggaatttcaattgctactacttttttaaacgtcgcctgcggattttcaaaaatacgtcgcgctaacttttcaatagcttgtgcagatgtacgttctgaaacgcctatagccaagacatctttagataaaacaagttcatcgccgccttcaatattgaatgggcaatctcgatctaaccagattggaatattcgcatctttaaatctaggatgatgctttacaatatattgaataaatattgattctcgtcgtcgtgctctccagaacatccgattgattgttataccgtgtcctattgaggcttgtggatctctagtaaaataaaggtttggcattggatctaaatagaatggatacttatcatccatatactctactagatgtgtacatttcggattaatttcttccttacgtacccctgacattattttatctacaagttcttgattagaaagtgtcgcaaataatgccttaatttcttcttcatgacctaatattgtttttttagactctgctaatacatcatcaataaattcacttcttacttgaggattttcaatactttcagctgctaacttctcaaggtaaagtacttcaacaccctcttctcttagcacctgcgcaaaatggtcatgctctttttgagctacttctaaatatggaatatcatcaaatagtaatccatctaaataatcaggtactaaattttctaattcttttccaggacgcttaagtaacacagtttttaaagctccaatttcgctatttactttaattggaccatctgtcatgtctatttcctccttttatctttgaattcatttagagtatagacaatcttcaaacgcttacatgtgattatattcacataaagaaagtcgaaaatttcatatctttttgttatacaatacataataatggatttttatacataaataaaggtattttgggtcaaaatatacattttttattcaaaaatacccataaaaacatgttgtataaagttttttatacagtcaattgaatgactatgaattctttctttccataaaaaaacgcgtacacaagttaatatttggtaactaacttgagtacacgtgatacgaaacaaatttttattattcatttgatacatgtctatttaaataattttgcatatacgtattctgccatatcatttgaggcagttaagattaatgtagtgtcatttccactcaccgtacctaatatctcttctatatttagctgatcgataaaatagtttatgccttgggcgaaaccaggtgaggttttgacgataatgtatgaaccattgatgattgaacttagaacttcatgttcacaatagtgtctaaacttttctctcatctcttgttctgtttgattattaatagctttataaatccatgtctcacaatcgatagggacacgatatatatttagttccttcaagtctttagcaattgttgttgcactatatcttacaccaaaatattcttcaatatatgaaatgatttgttcttttttataaatcttatgctttttaactattgtagaaacaatttctaatcgtttacttttcttcatattgtaaactcctttggtagttacgtttcttgtattaaaaaataaattcatgcatgtttcatttataatttaacactttgttttgcaaaagataataaaaatacatgtaaattttttgtgacaacttttaaaatgaattttgtattctaagtcagcatttaattatcacatatctactacttgtaatgattttagactgccgagtagtctttcggcagacaaccctcacactcctctcatctaattacaaagagagggtatacctacaaagtcaattatcaatgtaggtataccccatatataagctgtatttaaaatttaattatttataagtgtttaacattacttcttcttgtttatatatttttactccacgcctacttcattccatgcttcatacacctgttcagctgtttgctcgtcatataaatctttagccgcttggtataatgcatctttacaatctttgaagtttgaattacttgttaagtattccgttaatgctcggtagtaaatttgttctgatttagatttccctattgcttgaatcacgttataagctgctttatttggaattccagaattcgtatgtacgccaccattatctttttcagtgaatacatagtctttcatatgagctggttgaccaaattgttctgggtttgacatgctgcgtaaagcgtctccctcttttccaggtgtgtagacatcttcacccattaagaaatcctcgtcatctacaaagtatccaaaaacatctgaaaagctttcatttagagcgcctgactggtccttatattctaagttcgctgtctcttgtgtcacaccgtgtgttaattcgtgtgctactacgtcatttgcacccgataaacttgtgaatgtgcgaccatcaccatcaccatagatcattttgtcaccgatccatgcggcattatttctgttatcttgaccaccgtagttattaacatgcgttaatgaaacaattggactaccttggttgtcatatgattcacgaccaaatgtgtctttgtaataatcatatgtttgtttagcgtaataatttgcatctacgccagcacgttgctcatcttttacgaagttttcatcttcattagtaatcaatgttgcttgacctgtttgatcattaaagctaaatgctgataatttaccttgatgcgttaaatcttctaggctaaatccaccgtcaatactattgatattgatatcttttgtatcgccaagtacaccttttcctttaccagtttctgcagcttctttaactaagttcattttttctaaaatttcgccagtttgagcatcaattttaactttccaatgtgaaatttctggtgtcactgtaattaactcaacattataaacgtatttattactgtcaccatcgatttcaactttgttttctttaatgactttatctttaagatttttcgctttattcttatcaatcttaactgctttaaatgctttgtcggctgcgtcatctttacttaatgtcactttattcgttggctttactttcttcgcatcagtatccccattgattaaaacgacttttcctgatttgtctgcgtgtactttcacttctttgtcaggtgcatgaacaccatcaacactcggttgcaatgtataatgcgtaaatccttttttatcagtttttacatcagtaacagcgtaatcttgataaatattttttacattttcggatttaggcaattcttttaatgctttgaccgcatcactcttttgagtcacctcaaatttaatatcagaattagctggtttattttttgaatcaatcgctaatgctgctggtgataaagtgctcaacaaggttaatgctgccatacttgtaaatgcatatcttgaaaatttcctcacatttcattcctcctgaaatcttaaaaacagcttataaataaaatattaatttaatttttcagaaaagtaaatgattatttctatttatttctatactttttgttcgttgattttatttattgattcttttcttttttaaaaatgttatctgtagctaaataaaattttaaaaattgagcttaattatattttaaaatttatcaaggctttatttttgtgaaaatattaacaaatacaaaatagtgctctatatacttaatcaatgcttgaaatatgtgagataactatttaaataatcataatcaaataaacatttttatcaatttcaaacaactatgtaagacgcaataatcgttattatttaataaaaaagactagaatgcggtatcactcctcacactctagccttaatatgccattattttatttacttgttttgtatggtgtatgtccaactgttacttcgacaactctattatgatcaacgacaaaccagatgcctaatgtctttttagcattttgatagtaaaaaataccgctatcagcttcctttgttttaccattttcttttttcaagtccttgccataagctttttggatatcttttaatgaaatattatttttaactacaaattgcaattgacttgcttcgtttccttttgcagaaacacctttaaaagtttgatcatatttctctactttttttatcgtattcgttttagctaatttaataccattgaatttcacattatcatacttaatcgcgttaataaaattcttatccagaataaaattagcattattaccaatataaccattataagtataatatggggttattgctgcctgtgcctgtttacttgttggcgccgaattttcaacaactgttactccaatcagtgtgcccaatgctaatgttgctgctacacaaactttactggttttattcataattatctctcttttccatacaaatattttattccttacacttttattataactttttcagccataaaaatactaatgattatatttataaatacataacagttttgttatactaattgaagtacacaaaaaacaatgaaaatattaatatcgcctacttttctaatatttattttttaaaatgattatggcaatattgaaataaattatttagcttcacgtatcaactacttttcattaacatggaggcgttatatttgaaaaaacttcttattaccatcgtaattatcgtattaatcggagcacttgggttcgcaatttatgctgcaataaatcattctacatcatcaagtaataaccaagaacaagaaaataaatctacgcataaaaagacagaaaccgaagaaaatgatcaacaagatgatagtgcagacaaaacagataaaaatcaaaataatggcaataacgttactaatgacaatcaaccatcttcaccgtcaaatgttcctaacaaccattcaacagtaccatcgaatacgcaaccagctcagccaaaagactcaaattcaaataaaaataatactcacggtggtggcagtcaatcgtcaacaaacaaccaaaataatcaacaacagaacacaccacctgctaataaatcaaataataccaatacgccttctaaacaaacacctcaagcacaatcacctaaaaattaatcatttgcctgatacgtccacaagtaccagatgcataaattcagaaaaacagcagtgagatatttttctatttgaaatatcttactgctgttctttatttgcataattcgcactctgttaaaatcatataaaagttcgctttaatgtcattgacgtatgtataagctctcatgtttaataatattaatacacccttaaaaacgcttacacgaaaaatttagaaaggaggtacatgttaaatgcttgatagacacttaaaactactccagttttttattaaaaatccatcaaagcacattagttctaatgaaattgctaaacatgtcaatgtttcaaaccgcacagttcgcaatgatatccatgttatcaatagcaattttatggatgatatcatcgtaagtattaaatctaaaggatatcaattaaatacatctcagtataccttagaaacgataactgaacgttacacgcatattcaatcatataaagaaaaactattattatctatggcgtatcaactgctaatgcacaataaatcgcagacattgcaacaactagagcaagattatctattatctaaaactgtgctcaacgactatttcgttcgaattcaacaatggtgtcaaaaatttaatatcgctttaacaatcaagaaaaaacaaggtattgtggtcgatggaacagataatgatatcactaatgccatcatccatttaaatcaattatcatcagggcatgtacatgttgaagacctaattttaaatgaattacctgattcacaccaaaggatgatttcgcatattatacaagagacacttcaacaacatagtattgaaacaactgatattcaaatacaacagcttttaattcatctcattttaatcattaaacgtaagcaatctttaagtgagctagacacgttaaaccacgattcaaaattgatatctcaatcttgcattaagcaaatcaacgaaagattaggttatgacttgaacgaaaaagtaatcaatatgttttcattctttattgcttatcattttaataaactcgatattggcatagaacgtatatttatacaaagttatattgatcgcttaatcgaattgatgcagcaacgtattcatgtacctttcaatgaagattcgattttacaacaaaatttatataatcattttagtaaagcatatttacgtatcactcaaaacatttatttaaacaatcctttagttatagagattaaaaaactctatccctttgtgtttaacacactttttgaagcgattgataaattagcaattgatactgatatagagatgagcgaagatgaaattgcatttttaacaattcattttcaagctgccatcgagcgtcgtaccaaaacacaattaaatgtagtcattgcttgttattatggtctaggtgtgtcgaattttttagaaactaaaataaataacttatccgaagagttgtcagtgataaatacgattaaactagaaaatataacacactatcactttgacaatgtagatttattaataacgacccatgatattcctaaacaaacgctaaacatacttcctaagcacctgacgactatcaaggttgcaccattattttctgaagatgatcgtcacaaaatcagacacgttgtgaagcaaaagcaaaatccggttcaagcacatcatcatatggacactgtcaatttccttgtcgtaaatactgaacaaaaatcacggcatactgtgcaaatttttgaagaagctcaaaaaatattacaagcacatcatgcgattgtagaaggatatatcgaatcagctttagagcgtgagaaatcatcttctacatacataggtaattttatggcgattcctcatggagatcctgaaaaagttttacaatcacatgtgcttatttttcgcacaaaagatgtttttccttggcgacaacacgatgtcaaacttgtctttttcttagcgatttcgcataaagacaaagcttttacaaaacaaatgatgcaattaattgctaacttggatgatgattcagtgaaccatttatgtagtttagatgatcatagtttaaagcaacagttatttgaatacttacaagaataattgccactagtaacggtaattattcttttttttagtatcgagaatacgcttacaatatagaaaaggagatgattttatgaaaattgtagctattacctcatgcccaaatggcattgcacatacatatatggctcaagaaaagcttgagcaggtagcaaaagaaatgggtgtggatattaaagtagagacacagggcggtgttggtgctgaaaatgttttaactacgcaagacatcgaagaagctgacggtgtcataattgcagctgataaacaagttgatctgtcccgatttgttggtaaacggttgattaatgaaaatgttcgcgaagggattcataatccgagaggtctaattcaacgtatcattaatcaagatgcgcctatttatcaatctgaaacaaattatcattcgaaagatcgcggtaagtctaaaaatggtattcaaatggtgtatcaacatttaatgaacggtgtatcgtttatggttccttttatcgtagttggtggactccttatcgccatcgcgctgactctaggcggtgaaacgacatcaaaaggattagtcatcccagatgattcattttggaaatccattgaaaacattggtagtttagcctttaaatttatggttccaatactagctggatatatcgctgttagtatcgctgacaagcccggtcttgttcctggtatgattggcggcgctatcgctgctgacggtagtttttatggcagtgatgcaggcgcaggatttttaggtggtattgttgctggtttcttagcaggttatatcgcaaagtggattaaagatattaaagttccaaaagcaatggcaccaattatgcctatcattattattcccattatttcatcggtcgttgtaggattgatatttatatttttaatcggtgcaccaatttctaatatttttgaggcattaacaacctggttaaaaagtatgcaaggtgctaatattattatacttgcgatgattataggtgcgatgattgccttcgatatgggcggtccagtaaacaaggtagcatttttatttggctcagcacttattgctgaaggtaattacgccgttatgggtatggtcgcagttgctgtatgtacaccaccaatcggtttaggtttagcaacgtttgttcaaaagtataaattcaatcattccgaaagagaaatgggtaaggcttccttcactatgggactatttggtattactgaaggtgctattcctttcgcagcccaagatccattgcgcattatacctgcaaacatcattggtgcaatgattgcatcagtcattgcagccattggtggtgtcggcgatagagtcgcacatggaggtccaatcgtggctgtattaggtggtattgatcatgtattatggtttatctttgcagtgatagtaggtagtcttgtcacaatgactactgtactattattaaaacgcaatacaccagttatagcagtagatgcaccagcgcaacacacgcaacttcatgatacagatattacacaacatgatacagaggttgacaatgtagataacaccgcgaaacattcacatctcaataaaccttctcatgtttttgatcaacaaactatgataattactgatcacgacatgtctcgaaacgaagcaattgatatgttgattcataaacttaaaatttgccgttatgtagagcacacatcgcatttaaaaaatgcaatactagaacgtgaaatggagtctacgacagctattggcatgaacgtggccattccacatgcaaagtctgatgttgtaaaacaaccgattgtagctgttatgaaaaataatcatggtgttaaatgggacagtctagatggtagtctacctcaattgatattcttaattgccgtaccaaacaacagtcaggatacacatttaaaaatacttcagcgcttatctaaagcgttaatgaatgatgagacacgccaatcactaattaatgcaaacagtactacagaaatttataacttattaatgaaaatatagaggagttttaactatggcattatttttacaacccgtttttaaagacagaatttggggcggtcatgcattaaaagcatttaactatgatatccctaatgaaacaactggtgaatgctgggcaatttctgcacatccaaatggtcctaatacaattatcaatggtccatacaaggatatgaccctagatcaactttggtcacaacatcgtgaattattcgataatgattcacgagatagtttccctctgctaactaaagtattagatgccaatgataaattatctgttcaagttcacccagatgatgactacgctttaaaacacgaaggcgaactaggtaaaacagaatgttggtatattttagatgcagccccaggtgctgaaattatatatggcgtacatgcacataataaacagacgttaatagacatgattgataatcatgaatttgacagtcttttcaaacgtatacctgttaagcccggtgacttttattatgttcctgctggcactgtccatgccattggttcgggtattttaattttagagacacaacaatcctccgatacgacataccgtatttatgactatgatagacgagatcaaaatggtcaattgcgtgatttgcacttagagcaaagtaaagatgtgattgaattaggcaatcatgaaccaaatactactcctataacaactcacatcgacacacacactgtaactcaatttgtagataatcaatattttgcagtatataaatgggatattcatggagatttaaaattcaataaaccacatgcttattgcttagttacaattatcgatggtactggtactttaacagtaaacgataagcactatgacatccaaaaaggttctagctttattttaactacggaagacgaggatattcactttgtcggtaatattagtgctatagtaagtcatcctggataatagcaatgataacaaccgtcccataaaagacagaaattactatctcttctgtctaaaaacataaaaatccacacattaaggagctataaccctaatgtgtggatttaatttttattctgtaacgttactttggtcaactttttcagatacgcgcttcatcaatggatctgttacaggttttaaaattaaacctacaacgaagaatcctataccaaataacgttaatataattaattttgtaattaggatttccggaacaataccgcctactgtttcacgtaatgaatcaattgcatacgtaaatggtaagtatggcgaaatgttttggaaaaattgtggcgtagtttgaattgggaatgttcccccaccacctgcaatttgtaatacaagcaatacgattgcaatggctttacctgggttaccaagtaatgatacgcacgtatatacgattgagttgaaaataatcgaacagaaaatcgttataagtacaaataatacaggtgactcaactcctgcttttaggattaacaaatctccaaccgatacaatgagtgcttgcaacataccaagcattataaagaatcctgccttacctaagaacacttgtcttgtcgttaagactgactctagactcttatgtttattatcaaccgttaataaacttaccatcaagagtgcacctacccatactgacagtgcagtatagaatggtgtcatacctgaaccataatccttaactgggaaaacatcaacagtcttcttattaataggatttgcaataatacccgcttgctttttcaaatcattcttaagtgtgtcgattaatttgtcgactgcatcatctttgtctaatttcttgaaaattttattcgcttttttcaaatctttttcaacatcaggcaatttattttgagaaaaatcagctaaatctgataaagcctttttcgcttgtggctgatttttatttagtaatcctaccgcttgatcataaccatttaataacgttggtaaatttttattcacacttgctgtcgcattagttaatcgctgttctaactgtggtaagtcattgcgcacaaagttagcagctttagctacatcacttttcactttcgagaagtttgcttgagcatttttaacagcactaatgtattgttgttcaatacttggtaatactgtttgtaagcgatcaatacgtgttttaccattttttaaaatagcttgtccactgttaatgacttgatcaattgtatttaatttagactgaacattggataatgcagtttgccctttgttcaattcatccataatacgttgtgatattgatactaaagagctgttaagatcttttttaacataatctctaaatgatgataatgatgaatctagttttgaaagttgatctagtaatttagtagcttcagcagttcctgaactaccattctttaatgcattgcttaattgattaactaaccttaatgattcattaattcgattattagctgcttttaccttatcaatttcttttgataaatcaacattttcattcttctcaatctcttttaatgtatcgataaattgttgattatattgcgttgtgtattctaaaccggacttaacattatctaaagactctctaaaatcagaaggcttgtccgatgctaaaatcccatacgaaatattacgtaatgcctgactatctttttgtgcggctttcgcttgggtatctaaattatttgataatgataataaagagcccgttaatgccgcttccattgatttaacatctttatctgtaatgttttgtgtgttctcgttagctgtgctgacttgtgttgttgttatatctacaaaactttgaccatcttttttcccgcttgtactttgtggtgtagtcgatacaggcgcattattactatttggtgcggtattttgcgtaacattattatttggtgcagtatcgccacttggtgcacttggtggcgttgatgctacaccattaccagctgcaggtgcactatttgatgtttcgttgttcgccgcgctattttgaggaatctgttgctggtttcttcgatttaaatcttgcgcgcgtcgaattgcatcttgataatcaccgactctacttctaacttgtgtgacgaagcctttggcatcatttaactgtccattagcttgatcaataccttgactcgcaatgttaagtccttgattaattttagggaactgcgctggcacgtcatcagctgcaaaatttaacgctttttcaattttcggcatataattatttaaagctaatatcaacttagccttttcattaagttgcggaatagcaccattgacttcgtttaattttttctgagcatctaaaatatcacctttataatttcctagttttctaaaatcattggcatatttatctaaatccgcttggtggttattcaaatatacaattttattcgcaaagtcattaatcttaggtaaagctttatctgctgaatataccgcattttttatcttgttaattgtcggcacattttcttcaatagttaaacctgctttgttagcttcttctaataatgctcgagttactgttttattaaattgttcattcgctttttcaacgacaactgacgaaccagtatctgttagcttagacgcaacagcgttaatcttctgattcaccttaaattctacatctgctttttgaggctgcttacgtagtgtccctgtaatttcatgtgtaaacttagatgggatgtaaatacctgcaaaatatttacccatttttatctcatgatcagctttctctctacttacaaactgccaatcaaaacttttatttttcttgagtgtattaaccatcgtattaccgacattaacttttttccctctgattgtgtcgcctttatcttcattaacgactgcgaccttgatgtgtcccgtgttgccatatggatcccacattgcccataagttaaaccaagcgtagaacgatggcaaaatagctaagcctgctaagataatccacacagctggcgtcttagctactttcttcagatccattttaaataatttaaatgcgttcttcattgtcacactcctatgtaggaattattcatattttttatatattttttgtaaattaatttatttttgcgttgtgaattagtataatcaatttactggaagatatttagtcgattgatacctatcaactattttcagcatacgataaattataacaaatcatagtttattatcacacttaattattatatttttcaagggagaatacgaaatatgcctaaaaataaaattttaatttatttgctatcaactacgctcgtattacctactttagtttcacctaccgcttatgctgatacacctcaaaaagatactacagctaagacaacatctcatgattcaaaaaaatctaatgacgatgaaacttctaaggatactacaagtaaagatattgataaagcagacaaaaataatacaagtaaccaagacaataacgacaaaaaatttaaaactatagacgacagcacttcagactctaacaatatcattgattttatttataagaatttaccacaaaccaatataaaccaattgctaaccaaaaataaatacgatgataattactcattaacaactttaatccaaaacttattcaatttaaattcggatatttctgattacgaacaacctcgtaatggcgaaaagtcaacaaatgattcgaataaaaacagtgacaatagcatcaaaaatgacactgatacgcaatcatctaaacaagataaagcagacaatcaaaaagcacctaaatcaaacaatacaaaaccaagtacatctaataagcaaccaaattcgccaaagccaacacaacctaatcaatcaaatagtcaaccagcaagtgacgataaagcaaatcaaaaatcttcatcgaaagataatcaatcaatgtcagattcggctttagactctattttggatcaatacagtgaagatgcaaagaaaacacaaaaagattatgcatctcaatctaaaaaagacaaaaatgaaaaatctaatacaaagaatccacagttaccaacacaagatgaattgaaacataaatctaaacctgctcaatcattcaataacgatgttaatcaaaaggatacacgtgcaacatcattattcgaaacagatcctagtatatctaacaatgatgatagcggacaatttaacgttgttgactcaaaagatacacgtcaatttgtcaaatcaattgctaaagatgcacatcgcattggtcaagataacgatatttatgcgtctgtcatgattgcccaagcaatcttagaatctgactcaggtcgtagtgctttagctaagtcaccaaaccataatttattcggtatcaaaggtgcttttgaagggaattctgttccttttaacacattagaagctgatggtaatcaattgtatagtattaatgctggattccgaaaatatccaagcacgaaagaatcactaaaagattactctgaccttattaaaaatggtattgatggcaatcgaacaatttataaaccaacatggaaatcggaagccgattcttataaagatgcaacatcacacttatctaaaacatatgctacagatccaaactatgctaagaaattaaacagtattattaaacactatcaattaactcagtttgacgatgaacgcatgccagatttagataaatatgaacgttctatcaaggattatgatgattcatcagatgaattcaaacctttccgtgaggtatctgatagtatgccatatccacatggccaatgtacttggtacgtatataaccgtatgaaacaatttggtacatctatctcaggtgatttaggtgatgcacataattggaataatcgagctcaataccgtgattatcaagtaagtcatacaccaaaacgtcatgctgctgttgtatttgaggctggacaatttggtgcagatcaacattacggtcatgtagcatttgttgaaaaagttaacagtgatggttctatcgttatttcagaatccaatgttaaaggattaggtatcatttctcatagaactatcaacgcagctgccgctgaagaattatcatatattacaggtaaataagtattatattaaacccgtaaaatttataagtataaacaaggagttcggacttaaacatatttctgttcataagtccgatttcttattcaattaaacccgaggcattcagttcgaacgcctcgggtcgttttatataaatatattattttatgttcaaatgttcctcatcatatccgtttcaattgccatctcacacattttataaatatgagcaaatgtacttattctcaaacattactgccgagctttaattgacgttatattaactataaactacttttccatgactctacggattcaatgtcacatgagcgtgataaaatttgttcaataataaagtcatgtttatcatctgatctatcaccaacagcatcttctaaaacagtaatataatagtctttatctacactttctaatgccgtgctcaatacagctccacttgtagagacacccgttaatactaaatgattaatatcatttgcacgtaaataaacttccaagtaactacctgtaaatgcgctaaagcgtcgcttagaaataatcggctcatcttctagtggtgctaaatcttcaagtattcgtgtagatgcatctgcttcagtaatcgcatatccttgagctttaattgttgaaaacactttattactcgaggagacatcattaaaatgcttatctaacactaaacgtatgaaaatgactggtattcgatgttgtcttgctgcttcaattgctctctgattcgctttaataatattttttattctaggtacactactcgctataccttcttgcatatccaaaactaatagcgccgtttttcgagacatcttcattctcctttacttgtgtagttctaagtcgttaaattcattataacgttaaaatgatggacaatctattcattgcattttgcatatacttcacaataaattaaggggaaataagacgtcttatatacttaaaaaaatatatagatgctcttcccccaatataattatgctttatttttcaacttattgcgtcgtgataaccaaatcattagtacacccattgcaccaacaattacagatatcggcaaccaatgttcttttatcgtttcccccgctttaggcaaagatacattaccatcagcatttaataatccacttaacaatccattacctttaccaagtgttaacgtcttttctggctttggtgtgggtatatctggaatactgtctaataaatctgatccttgattcattaaatttgctaacttatttaaatctgtcgttttcccatttttattcaatcgatctagtaaacttggacgatttactattggtgataaaatataatctatatcttttttcgtttgattgagtctcttttgtaaattcaataaatcatccgctttaccattcaatgccgatttaactaaattaaaaattttattttgatctgtttctattttagtaattaaatctgccagtaattttgccttttgtctttctatacgtgttgctaaaatcgtttcaattgcttgttttttatctttggcattattcaaaattgcttttaatatatcatctgaagacgtgtcgccagttgatgcaaaatgtttcttcaattggtcaacgatttggcgatttgataatcctttattcgtccaatctttagccaatttatctgcttcagcttttcctaatttcgtttgtaaaatttgagaaatcaatagcgacttatcttgtgattgatcaatcaatgacgttaataaatcatcactcgttgtcagagataattgatcaatatgacgagtaatttgatctgcaatttgttgatctgttttaccatcaacacgtatatcttttagaattttaactgcctcgtctttattaaatatactttctaaaatgctttgtgtagcatactttttatcatcagtacgtgcaagttcttccaaaataatatttcgttgactttttatacgctctttcgtcttatttacttcgctcattaagtctgatttttgatttttaggaagttgcgtatttgcaatacgttgatctaaagattgtaacgtattcagtttatgatatgtgtaatgttgcgttgaggcattacttttagctaatttttcaatcatagcatgattaattttatcgcttccttgtaatttatcagtgagtcgattactatggctttgattctcttcatttgaaaggaatttatttaacacaacatgtccagaaccatcattatttggcgttttagctacttcatgattattatctgttgtagacactgctggatcttccgatgtatctttcgatgcatctttcgatttgtgtatttgctgattcaaatggtctaggtcttctaacgccttatttaccattgcttcatcatttttatcatctttttctccatgttttgttgtagccgtttgtgacatatcatttttcattgcattaagatcgtcctcgccactttgttgacccctatcaacatttgaagaaacctcatttaaatctttaagcaattgatctaatttactgtctatatcactttgaccgttcatttcagtgtgagaacttttattgtctttgctatccaactcattagctcgttttatgatttcatctatttgcgatgctgttttcgcttcatttagttgtgctttataatgttctttagatgaagccgataactgttttaattgctcaatttgacgaattgccttgtcaactttgtctaataaatcttgcttagataatatctcttttgtaatttcagtatccttttcagatgcagcttgggcatcgtacggcaagatattcgttaaaatgatacttgtcgccatcattgtcgaacacgataactttacatataattgaaacggtttccctcgatatttagccatcaacatactccttcctcacttacttccttcaaagaattacatactattatatacctgtttacaagaaatttacacttatctatctagttattgttgttagtaattatctacttattacttagcttatatttaagtaaacaaaacaagcatgacgtaatatcatattgtccatgtcgctaacatcatattacgtcaaatcttttatattaaatgatgttttattttagactgctttttccttttagctttcgagcgcctgtttaaaaacttgctcgaattgttcacgcgagatttcgtgtgcatgtgctttttgtgctaataaagcatctcgaaactgttgttgatctttcaaactttctaacatttgtattaattggtctttactttccattgttatctcatcattatgctcaaataagtgctctgataatgttactttagcatggtgtgcggtttgacgataacctaaaatcaacaactcatagtcaaacgcttgttccaccgcatttaaaatttcattaccctcattgatatcaagataaatatcacataactggtatagttcatttaccctgtcaatattaatagatgggtataaatgcacattagcatattgatcaagttgcattagcttatcagacatctctgtaatagcagcgatgtgaaacttaaaatctggtaaagtttcaaccaataccttgatgttacgaagttgatccgagttagttaatattacaatttctttagtatatctattacgactacgatagttatatagatatccgccttgtaaaatacgagattgaacctttgcgtctgctatattgagcatcgtttcatattcgtttttatctggaataataatattacaatgtcgtttcatatcacctttacacatcaattgcatatttcccgggacattaccattacagtgttcttgccataccaaaacatcactaccttttgatggcaaattatataacactgaaaatggtagggctagtgagttaataacgaaatgatgttccgtaatttcaagttgcttgataaaaaataatgcgaatgcgagctttgaagggaaaaagtaagacttcccttgccaatccaatatgacatcagatgttacaaaattttcataaatcacttctttaccttctgctgtcatatatttcttcaagatcgctttacgatttaaatcgtaaacagtttgtgcaaatttaataccattcttagaataataatcgacaaatcggacacgttgttggtcatcaaaccattcgacacgactaacaattctagggcgctctccactttgataaaatattttacctcgtagacgtcccatatcattaattgtagccgaattgttgttacctttaatttcccaaaaagctggtacagtaacctgattaaaaaatcgtggtttcatattttctgtattatgattatctgcaaaaaattgatacggtgatataacatcgtccggtaaaaagccattgtcattgagtacaattgttaaatcttcttccaacttactggctttaaaagactcatataactttcgtgaatgatcgttaaagtaatcaaataatttaatcatgtagcacctcttgaactaatgtttcccattttaaaataatatcttgagtcataaattgctgtgccacttcataagagatgtcatgtggtgtctggggaccattgttaaaatacattacaatggcatgagctagttttgcgataacatcatccacactatcttcgtcggtatcaaaaggtaccaagtagccattttccccatctcgaataaaggttgggttaccataattcacatttaatccaatcatacctagtcctgagcctaccgcttccattagtgttaacccaaaaccttcgctagttgatgcagaaagaaataactcataatcattataaatttcatcaagtttaacatgccctagtaaacgaatataatcttgtgcgcggtgtgtatcaataattttacgcagtcgcgtcttctcgctaccttctccataaatatcaaatgttaattctggcacttgtcgtttagccacgataaccgctttgacaagccaatcaatatgtttctcattcgctaaacgagatgcactaatcatcgcatatggctttcttgataatgttggatatgataatgcatcaatgcttcccacaggaatagtataaacacgtgggcgataaccttgatattgctcaaattgtcgacaaaccatatgattttgaatatctgttgctgtaataaagaaatcaatgtatttagcttttgaaaattgatattcataataattgttccatagtatatgctgctcactcatcatattattactataatgatcagcatgaatcacaacaccaactttactatcacctttatgctgcaaaacagcctgaccaatatcagaagcgcggtctaatatgacaatatcgtctcgggttaaattcaatcgttgtaaaaagtatgcaataaattccgttttgttatacaacaccgcatcttcaaacacatatatagagctgtctccatcaatatattcgttataagcgatggaaccatcttgattataaaattgtcgcatatataatttcgctttattatcagctggtgcataatactcagaaaatatgcgcgtataactataaaaatctttacgtactaacatactattaattacaaattctgcacgatccacaatatctttttgttcattttgcagataacatgttacaaatgatgatttcccattaaaatataggcggactatcttaccatttctttctctaaaactaatgtcatgaccaagctcacgttcaatgtcatctaacgtgtacgttgttggtgctaaagaaatatcactaaaatactgatacaaccaaataacttcttgatctttaaacccaatgttttgcgttaatgtctgtatgttctctgactgtataaaatctaaaaacacaaatttagtgtcttgatttgtacgtctcaataatttagcacggtaagcttgtgcatattcaacaccgctactcgcccagcctataccaaagtttatattatatattgtcatgcgctaccccttttcatttatggaaaatgtataactggcataccctctttatcaaatgtaatcatgctttgacaaatatttttcaccattctttttttgatatttcgtgtcataacttcaaatgaatctaaggcaactctatggtattcaaaaatagcgttacgttgcccattttgtcgttgattaacgcttgcttttaattgttgtaaatagtcgacttgttctaaccaacatgaatcaattgctttcaaaaagactttttgaacgaaaatattataataatatgcactttgcatgtttttacgattcaaagctaattgcttttcaaattgctctaataaaaatgtcactactgcttgcttatctttaaaattaacacaagccacatctttattaaattggaaacttaaattttgataaatatactcgacaacacgcgattttgttagcaccttttcctcatttacaaacatttcaaatacatctttagctaacgctttaaaatcttgattctcagcatcatctatttctaaaactcgattgcgttcctcgtatacaagatctcgctgtatactaatgcttttttcaaattcattagccatttcacgagctttaaccccttgttcttccgagatacgctgcgctttaactacaatttgcttaactttgcgattaaacaaattactttgcgataatcgttgtgcatctaatgaatataattgattattttccgctaaattactatcgctccatcgcttaactaaataatcatctagtgaaatatatatacaagatgatcccggatccccttgtctaccagaacgaccacgtaattgcctgtctacacggctattttccatatgttcatgaataataacagctaatccacctaatgcttcgacaccttcaccaagtttaatatctgtgcctcgacctgccatactagtcgcaacagtcatggaaccaatttgccctgcttcagctatcatctgcgcttcttttgcaacattttgcgcaatgagtaaattattaggaatatccatttggaataatactttcgaaaagtattcagccgcttcagcagttctcgttatgagtaaaaccggtcgccccgtttcatgaagttcaactatatcatgaatcatcgcgatgtttttctcatcaactgaacgaaacactttatctggttcatcgatacgttgaatcgctttatcagttggtacttgtacgactatttttgaatacaaatcaaagaactctgattcgcctaattttcctgtagctgtcatacctgaaaatgattcaaaaagtttaaataaattctggaaggtaattgttgccataacacttttatctgttgaaacctccataccttctttcgcttcaatagcttggtgaagtccagcttgcaacttagttcccggtaacatacgacctgtaatacggtcaattaaaacaatatcaccattatatacaaagtaatcgacattagattcaaacaaatattgtgcgcgcagtgctaaattaatattacgcactaggaccatcgcttgttcgctatataaatcttcaacattaaagtatgattgtgccgcttcaataccttgatttaacagccatatttcttttttggtcttcttcattttaaaatgcacgtcttcaatcaatgtatctacaaactctttcacaatatgaaatagatttgattgtaatcttggtgcacccgaaataactaatggtgtttgagcagcatctaaaatgattgaatccacttcatcaataataccgtaatttaattgtggtaaaaatttcccttccgcactatcagccaaattatcaattaaataatcaaaaccgagacgtccattagttgtatatataatatcatgttcatatatattacgtttttcccctttttgatactcataatccacaatatcaacaaaacctaatgaagcagttaaacctaaccattcatataatggttgcatctcttcaaaatctcgcttcgctaaataatcattcgttgtaattaaatatgttccttttcccgaaagagcatttaaatataaaggcatcgttgccgttaatgttttaccttcgcctgtttgcatctccgcaatgttaccttcatgcaatacaatcgctccgattaactgaacttctttaggatacatacctaatactctccagctcgcttcacgtgccactgcataagcttcaggtaacaatgtatctagtgtatcaactcctgatgctaaacgttctttaaattctattgtcttttgttttaacgcatcatcagaatatgatttaacttcatcgctccatgtattgatgcgtttcactatttttctaatcgactttagtcttaattcgtttatcgtaacatctagtttatgtttcatttacttccccaccattcagtttcgatacatctaagtaatctaaaaatcgtactggattcattaaacgtgacatataatttagatgtttgtcttgctcttctttaaaataaacctcgacatttgtatcttttagttcatgatttcctgggacatgttctgtaagccatccttttaaatcatcatcttcatggcttgtacgatacactttgcaacccaaatgctgagcgacataagttgcaaaaacatttgactttgacccataactaatcaaattaatagcctttagggtatcttgactttgcaaatcattctttagttgcttaatatttccctcgatattgtcgtccatccaacgttcaacgagccaaacatgaccaaacagtttcaaaaaatcattcgaaatagttggataggtgtcagatggttctgcaataatgacattgatcatatcatttccatattggtcatcgcctatcttcgtcacccgcatgcttttatactctaaatcatattgatgcgtcatctctgtgattgttaaacatctaaatataagactcgtcgatgctgcattcatcatttttattttataagcataggcttcatcaggatattgaatcgtaatactatttgactttacaatctcagtacttagttttgtgccatttttattataaaaaatgatgataaaatacactgaaccagcaggcgttgcatcaaaatcaaaatgcaatttataatgctgtcctctacgcaaaattggtaaacttggcgcacttttatattttgaaaattgctttaacatcaaccactcatgaatcggtaatccagagggcatcaaaggatttataaaagtcacttcaccatttgaaaatgatactttagagccatacataaatgtagtttgtgaaatataattccaagtaactttaaatgttttgtttttcagcatgttgaactctcccaaacttgtcttccaaaataatgttgtaaaaattaacaaaccaacttgcaatggtaggtgaatcatcattatgtcgcccaggaatactgcgattcatcactcttgcttggtgtgctgtcaatacaggtaatagctcttgaaatgcatgtggatcataatcatcatgttgcatatatgctatggcaaaaacagtttgtgacaatgatttcttttgaaatgtttgccaaaatttttgatttaatgcctgtatcgacgcttgagatgtatcaccttcattagacaccaggacgtctaatgctgtaccgaactcttctggtctaagtaatcgcatatgttcagcaatcgttccaatattaacaagtggtttaccaacaataattgcctgaggatttaactgagcaccataatacaaggcaccaaatgaacccatagataaaccagataatattaattcatgtgatttaaaattcagcttttctaatgtctcgtcaataacattgataataccttgttcatattcagatgaaccgatataaaaactaccaccttcaacacgaggatcgccgataagtaaaaacggtgcattcatacgtttcatcatataatatccttcgaaaccttccgctgttcgataaccactaaaatatacgtttagtggcggtttcatatcaccagggtggaaataataaataaattcctgtcgttgactatctacgaaacgactaccaccaagtaaaaattgacccatgtctaatctagaccatcgtttgtgtataggtcctaaatgtaccgtcccgttcccacgcgccttaacagttacacttatataagcatcaaatggtttcgcaggtatctctaaaggactgtctaacatatcatcagtcaatacgatttgttcaattaatgcaccatcagcgccagtctgaatcaatctaaatgtatattgcaactcgaccgcaccatcaatatcaaattctggccatatttgaatgactttatctttatcgtaaacgagattattttgccaagatgcgataggtttaaattctttcccaaattctccactcaatgtgagctctgaattaccttggtaaacgacatctcctttaaaattcggatgcacaagtgctaacttaggagaaaccttatctccatactgtcctgagaagctaactgcctctaatttattattacgttcttcaatattccggtaatgtaatggttgaacaacgtatttttggacattttcgtcttgttcatattcaactgaccaaaatgattcatcaacatacgtattgtatggttcgcttatcatttgtaataaattcgttaatgtctccgagtatggtgcttgaatatagataaaatcaaagcgcccttctgcttcaacaatcgcttcaatagcctctacataaccactatcaaattcaaacaatccaatatcgaagtaatcccaactcacaccttttttgtgttgaaaaataggttctaaatcgtctcctccaatttgcaaaactctaaatttacgtggcatcattttcaccttctattaactcatcgagctgattaataatattcttagaagcatatgcatctattaattttaaagaataggcgtacgcataattccaatttttcaaataaaataaataataatttaacgcatcatctaattcatcaactgtatttataatacggccattgtcataatcagagacgtaatctgtttgttgaccattaatttgtggaatcccagcgctaattgcactaatttgtaaatacaagtcaggttcttttgacatatctatcacaagtcgcaacgtccgcaatgcttctacaacatcatgttcagcatgtatcgtcttaacagcaatgatgtcatcttgatcttcaggtgtcattaatgctgaaacattaacatccgcattctgtttagcttggtattcctcatttaccgacgtaatacattcacgaagccacatcggtatgtcattttgatggcgcgataataaaattaaacggtaataatcttcctgtgcgatataatccacaagtcgttgcatcatttgttgcaaatcagcgtcactcataccatctatccatacacctataaatgtttccatcaattgactacttatattaggtgattgtctcgtttcaaatggtgtgattcgaatcattgtattctcccgctgatacttctcttgatgactaattaaatcacgttctagttgcacactatcaacaattaaatgggcattctttacgatagattgatattcctcatctgacacagtttcatttctatttttaaaaaatgaataacttaatgatttcgctggaatatgattggctatttgtcgattgtgcctagcatctgaagccacaatcacatgatcatcttcatgtatttgttgtgcaatcattgcttgaaatttttcttcaattagttgagccatattgttatattctgtttgttgatagtgatgttgatatctttttgaaacagtgactctgccatttttcaaatcttcatgaagtacacaatctccattaatcgttaaatattcttggtaagaagcctctccctgatcatcaaaataacgtatcgctgataaataacctctgtcatcaaaaatataacgccgttgtaactgatctctttcaaattcttcaaaccaaattgaatacccttcttgactaaaataaatatttgtataggtctgttcactcgtcacacattttaataaatacggtgtgtacacaaactcaacatcatccggccattttaagtgatgataattaatcgcttgtggcgcatggtgactgaatccttgaatttcatcaaacacagacgaatactttgtctcatataagtcatatcgatgtaaaaatgttcttaaatttggtgcatgattgagaacaatcagttgataatctaagtcattttcaaggtgcattcccattaaactaatcatatcgtcaaattccgtcttattttgtagttgataatacggcacagtcgtgtcttgccaccatcgttggtcatcgtaccaagctggaataaagtatttcataattacctccttaccaatactggtttaaaaatggcttatatttatcaaaatataaatatgtacgaattgtttctgcaatattaatactgatgtaaactaatacaatcagttgtactgagaaataaatttcagtagataaatgcggtacaaacaatgtgaaataaagcggtataccaataatgactgtaactaatgccaatccaaaccaacatacgcgtcgtgcttgataatttaaataacgttctgtatccttaccaggtttaactcctgaaaaataattgccactctttaagaaatctttggatttttgtttagtattgattaaaaatctcgataaaaaataacccaataacatttgaatcactaaatatactgaaatacctactggactatcaaatgtcagcattggcatgtcatctgatatgcttttattaaacatagataaaataaaatgaatgccactttttaagaaaacaaaagctgaaatactcatcattaaagtaatactgcctgcagggttaactttccaagataaataagatttcatatttgttgcggaaacgttcattaaatcgatatatggtattctcacttctactaattcaataaataataagataaacaatgtgattatcacaaggatgattaacaacgcaatcacaatatgacttgcatctatatattccattttttgatgcatcattgatttaataatactaaccattacaatcggcattggtcctgcgatgccgtagcgactatttttgtcagctaaccaaactaataacatcgttccagtaaccaaaatcaatattgttaagtaaatattgtcttgatgaacacgttctttcgaaacatattcatgaatcacaaaataactttgaataacacttaaaattaatgttaagatgcgctctttataatgcttctcaagacttgtttgtttcatgtatttatccatattccgataagaaatcagcatcaagataatcattgatgttaaccacggacctaatcctaaagtgaaaatgtttaaagtattaacgtctccacccatattagaaatagctattttaaaaaatgactcatgttttacttgcatatcgttataggaaacgatggaaatgtttgtgcctaatatataaataaacaagataaaacatgtgtatagcatacgtttatatataattttatattcgtattgttgtaaaagttttaacatgttgcacctcttttatatcaaaaacattaaaaagactaagggttcatcactaattattaaaatcctatatcgatttttctagtgattggtgcctcagtctttttaattttagccagctataaattcaatttatgcttgagaatcatcttgatcattttcatctttctttttctttctcttcattaaacctaaaccaactaataatgtcataacgccacctagtaatccattttgttttattgagtcacctgtatctggcaatcttttttcactttgtgctggtgtgccattatgtttagtcacttcagatgttgcacttaatgtagactgagattcactcgtgctcgttgttgcttcacttgataagcgagatgtgctcgtgctgtgagtatgatgcatactcattgagtctgacggatgcattgagttagattcagatgtacttgttgagccggacatacttgttgatgttgagtcagaaatgctttgtgaaccagacatagatgtactcagtgattcggatgtgcttgtcgaatcggatgtgctcaatgacgttgatgtgcttgttgacactgattctgagtcactaattgatgttgagtcggatttgtcttgtgacattgaaacactcgatgaattagattcactcattgatgttgagtcagatacgctcgttgaacctgaaccagacgtacttaatgattcagatatgcttgttgaagttgaaccacttgttgagtccgatgtacttgtcgatgtcgagtctgaatctgatgtactcaatgattctgagtcactgatagaagttgaatcacttgtagattctgattctactgtactttgtgaaccactgatacttattgaagtagaatcactgatactgtctgatgttgataatgatgtcgacaccgatgtgctttgtgatgacgatgtactagcactcattgacattgatgttgatatcgatgtacttaaggaaccagatgcacttgtacttgttgactggctttgtgacattgaatcacttaatgatgtagatgtgcttgttgagctcgagtcacttacacttgttgaacctgatattgagtcacttaaacttgtcgatgttgaaactgatacgcttccgctcattgagtcagatgttgaaagtgatgtactcgttgaatttgatccactgatgctagacgaatcacttgtagacattgagtcgctttctgatgcactgatgctcatagagtcaaattgactattacttgttgagcttgactgcgaatcgctcacacttgttgacgttgattctgatccactcatactttgcgagctactcaatgattttgaatcacttaatgaatccgaagtgctaagacttgtggaaccacttaaagatattgatccacttaatgagtcggagtcacttgtactagtagaatcactcattgatattgaatcacttagcgaggtagactcgcttacgctttctgaaccacttaatgatgttgaggtactcaatgaaccagatgtacttgttgaagtcgaaccacttgttgattttgaatcacttaatgaatcagattcactcacgctttctgaacttcttagtgacgtcgatacacttaatgatgacgaatcgcttgtgcttactgaatcgctcatcgattgtgagcaactcaatgaacttgactcgcttacactttctgattttcttaatgacgttgagacgctcaatgagccagaatcactgacacttgttgagccactcatcgatttagagtcactttcagaattagattcacttacactttctgaatcatttacagattctgacatactttgtgaatcagatatgcttgcgctcattacttcactagccgatgttgatgtacttgtcgaatcacttaacgatatagacacactcatcgaaccagatgtactcgcacttgttgagtctgatgttgaatcactaacactatcagataatgacgttgaatcactcatacttgttgatgtacttgtcgaaagcgacatactttgtgaatcactagtacttgtacgcatcgaagtactagttgaagctgatgtactacgagagtcacttgttgatgttgatgtacttgctgatcctgatgcacttgtacttcttgatgtgctttgtgaatcgcttaatgatgttgatgttgaatcggattcacttgtactttctgatgttgagccagactctgatgtacttaccgatgtagataaacttgcaatggtcgacatgcggtttgaagttgatgtacttagcgaatcacttaatgatgctgatgtgctttgtgaatcggattcactgctttgcattgacgcagatgttgaatcacttaaagatgttgacgacaaatcggattcacttgcgcttgctgagttactgagcgatgttgacgtacttgctgatcctgagttacttgtacttgttgagtcactgagtgatgttgacgcactttctgatgttgactcacttgcacttgttgagatactttgtgaatcagattcactctctgaaccacttaatgacgctgatgtgcttaccgaacctgattgactcgtacttttagatatacttgttgaatcgcttagtgacgttgatgtcgatgtggattcactttggcttgttgactgacttgtatatgatgatgtgctttgtgaatcggattcgctcgtgcttgtacttgttgagtttgaggcactttggcttgctgagtttgagtctactccgctttgattcattgaggcacttagtgacaatgatgtactcgttgagtcagacaaacttgtactcgttgacgtacttgtacttcctgatgttgattgagacatacttatgctcattgatgttgaatcggatttactttcacttgatgatgttgagtcggattcactttcacttgtagaaccacttaatgatgtggatgtactaatggaatcagatttacttgtactgattgaatcacttgtcgacattgatgtacttaatgaatcagacttactatcacttgtggaatcacttaatgatgttgacaaacttgtagagtcagacaaacttgtactcgttgacatactcagtgatgttgaaacactctcgctcttaaacgttgacgttgattcactgatacttgtcgatgttgaaatggacgtactaccacttgttgaattacttaatgatgttgatgtgctaccagattctgatgtactgtctgataatgacgtactctcacttgtcgaactactcactgactctgatgttgattcagacgtactttcacttaatgattcacttaaaaaggcagatgcactttgtgattctgaatcgctagtactatttgattcacttaatgatataaacgtgctctctgaagcagatattgcttcacttatagagtcgctcgttgacgttgattcacttattgaatcagactctgatgtacttaagcttgtggaatcactcatagatgttgatgtacgttctgaattacttgtacttaacgatgtcgaagtacttaccgaaccagatgtgctcgtagaagcactttgtgatattgattcacttgatgcagttgatgctgatttgctatcactcgttgaatcactaaacgacgttgatatgctcattgaatcggattgacttgcactcattgaaccagacgtactttgtgattccgaagtacgtactgaagcacttgtcgacgttgatgtacttgttgaacctgattgactagtactttgtgataatgacttactatcagaatcagatgtactttgtgaatcacttaatgattctgatgtactacctgactgagacgtgctcattgaactacttacggacattgatttactgtctgatgcagataatgacccacttgtactgatagagtcacttactatctctgaagtactcatcgagtctgatgtacttgttgagacactttgtgatgctgctatgcttagtgatccagaaacagaaccacttgtgctcgtcgaatcgctcaatgattctgatgtactcatcgattttgaatcacttgtacttaatgatattgatgtactttgtgaatctgatttgcttgttgacgcactttgagagttggctatgctatttgaaatactgatagagtccgaggtgctagctgactcgctcaatgatgttgatgtactaattgcattcgatgtactgtcacttaatgatgctgatgtactagacgaccctgatatactcgttgataagctttgtgacttagacaagcttcctgatgtactcatacttaatgagtcactgagtgatgttgatgtacgcaatgaatcagatgtacttgttgatagactttcggatttttcagtactgctagagtttgaaatagaatcgcttaatgatgttgatttactagctgaatccgacatgcttgatgatacactttgtgaattcactaaacttgtgcttgttgagcttgatacactattactttcagatgtgcttaatgacttagatgcactcacagaatcagataggcttacacttgtcgatttcgaggtactagctgatgtagataccacaatcgatcctgatgtactcgttgatgcactttgtgagtcagctttacttgttgacacactttgagattgttgtgtacttcctgatgttgatacggaatcactcatgctatttcttgttacttcatatttaaaagttgtcgtcgttttgttaccgctcgcatctgtagaaacgattgatatagtacttgtaccaatgtttgttggtgtaccactaatagtattatttgtactatcaaatgttagtccggatggcaatccagtcactgtattcgtcaccgcatttccactgttatcttgcgtagcaattttaatcggggatattggtgaatacacttctgatgattgatctcctattggtgtcactgttggtgctgtcgtatccacaacatttattgtaaaagttgtcgtcgatttgttatttgcttggtcagtagacacaactgtcactgttgattgaccaatttttgttggtgtcccaatgattgaattcgttgcactatcgtaacttaatccgcttggtaatcctgtaactgtatttgtcacagtcccagtaccattatccgttgtagtcaatacaataggattcattgttttacccacttctatggtttgattgcctacagttacagttggtgcttttacatcagtaaaataatatgtcactgattgtccagcattcgtcatttttacagttttatttgtatcattataagttgacgcatatgaactatcgacggacgtgtagttatatcctttagcagtcaatgcagattgctgattatcgattgtcacgacttgatcaacatttcctgaatatgtttttggtggaataatatctttacctgttgttacatcaacgtatctcacttgtgtaacagcagactctgtatattcgaatgttccaaattgtacttgttgtaaatttgtcgcgccacctgttgaggctgtcattgataatgaaaagttggtcgtaccacttttcgcaatccaatctgaaatattacgtgtccatgtttgacctgcatatttgacagtcataacctttgtatcaccattatagttaatatcaaaatcttggaacgtgttatttgtaggttgaacatttaacttcgcagcattatcagctgttgaacttgatgtatacgttgtcgcaacaccataactatctgttgttacaaatgcaccaaacgcacctccaccagctacattagatgggtcagcattcgcctttgcagctgaatttggtttagatgtattgtgatacgtatccaatttgaagccaaatgcgttacttaagccaccaatacctactgcggcaccgtttaaccctgtttcacctaatacacctggtgaaaaggcaaaaccgataccatctccaccatttccatgcccttcatatttgttacctaaatttacttttccagaaaaatgaaaactcttattagagtcaatacgtgttcctaatgtaatagcacctttttggctgtatgcatcctgtgttaacgtcacaataccggtactttgatcataggtagcattacctgacgttgtcatatattgttttaagttatctttattaactgtaattgtattagcagttactgcggttgtcgtcgctgctgacgcaaatgttgacatagctaagcgactgaaagttcgaagttttactggtgcggtgctagttgacgttgtgctagttttgtttaagttgaccgaagatggcgttgtgctttgtgaagtgttatttgatgcagtactttgatttgttgatgtattaattggttgttctgtacttgaagttgaagctacagatttagtatcagaacttgatgtagtattctttgaggatgttgattctgatgtagatgtcaatttctcttgttgattgcttgtactattagttgtcgaagtgaccttttcagacttttcacttgagactgtgtcactatttgatgtttgtaccgaactactatttttcgttacacttgtggaatcggctgttgatgttgatgcttcgattgtcgttgagttttgattacctactgtttcactttgtgtgtttaattcagaagttaatggtgcatcagaagccgcaaaagcttgctggtcatgcaacatatttaccgtgaatgcaccaccaataaccgccgtagttttcagtccgtatcccgtcatttttttactaatgctttgattatcttgactcactaaactatgactaataaatggtagccccataattttgaacatttctatttctttaattccggattttacccaattttttccagatttataaagtcttactcttgttttttcgtttgctaagctgtcatgaaatgctttctgtcttttactcatgtaataactccttgtattatctttacattcattagattataatatatgccactattcaatttaatacaactcttttttgatacaaaaatactcattttgttaaaatttgtaaaaattcatttttattcgtctaaatgtaatcgttttcatatttttaaaattactttttctcgtttatgcgtataatctttttttatataaatttggctaattggctttatgtttaatcattataattgtttcgtttttaaaataattattgtattaatatatctataccatccaccttttatttataaatagttaatttacaactaaacgataaatattatatgcaaaatacatctttaatattaaagtaataccaatattttttcaataaacctagtgtaatatatgtgtaattctaaaagattcttctttaaaaatataaataccacgacatattgctttaacattttcatttataaagcgaaaaaatgcatcgctactaagttgaatgtttagtaaggatgcattgaattcactaaaatgattaaattacttatatcttttcatctgattgattatcgaaatttcttccttctaaacctgctaactcttctttagaagctgcaggtgctttcatttcaaatatctcattcactactgtgtaatcgtaatatcctaatctggcaataggtttaatcgacttaatgtccaatttaccattatcaagaataaccttatcgtcaatatgaacttgggcaactcttcctataacaatatctacggtagatactggatctccagttggaatacgaatcgtttgaacgtactcacattcaaaatgaactggcgattcttttacacgatatcctggagcttctatacatttttcctttgttacacctgcaaaattaaattcatcctcttctggtggcaatgctttcgatgataaattaactgcttctcttaaatcatacgttgccatattccacacaaaccaacctgtctcttcagcatttttcactgtatctttacgttcgtgatcaccaagaacggattgatttgctgcgaacataaccataggcggatcccaagttaagttttgatactgactataaggcgctaaattatctttcccatctttcgatacagtagagatccaccctattggacgtggtactgtactacttttaaatgggtcgtgcggtaaaccatgacttcttacaccttgttttggcgaataattcatactatcttcaccccttataagtaattacatttaaggttacgccctctttacataagcgtctaatataaataaacaatttatttataagtagaaactatatatgacgtggttgcttataatttgcgttcttgattcgaaaaattcagataaggatttatacaattaatatttatgatatcttttgtaaatttaattaattatagttacttcaatcatgattagtttataataataaagtgaaattgaaaaagacagctattatgcgatgagcgaaaaacttcaagtaaaacaagaatttaacggcgttacaaggcaatacttgaatttcagaacagatagtatcgatgatctggataagttcaaaaaagaattcaaacctgttatgcacttaaaaggtgatgcattcaatcaacagttacaatctttgattaacaaatatccacaaatacaaaaaaatatgaaatcagagttcattgcttattatgataaagaaaaaaatagagaaacagtaaaaaactatgcttggaaccttcaaaaatctataaatgacattatgcaatcatatcctagcacaaaatttgtacagttttataaagatgatgtttccccgtcaatggtagatggaaatggccgtttaaaatcggatactaatgtaatttccatcgagggaggaaagtatgatgagaacaaatgatcatataaccgatttagatgctattgagttaagtagcggttggaattacaattcgaaattggagactggcaaaaatgcactactatcagatagccttttaagagatattaaagtattaagttctaatgctaaaggcgacgctgacatactagaaacagaacttcgtgctgtaataaactcaatgtctcaaaacgaaggtaaatctgttgatgcacttaaaaatagtaccgcttctctaaaaaacaatctaaccaaattaaaagagcaactcgacaaaactacacattaatttcatacattttgagtgaacagaattatatttccatagcaaacattcctaaactacacatacgttacataattgattcatttttatagaaacgggtaaaaatgataaagtaatcatctttcacaaaaaatcaaatattgggaggaattaaatatgattttgcgttacgcaacgaatttaaaacttgcgaaagagctataccaagccagtaaacctaaattgcaagaagataagggtatgattgaactgtttgaacatacttttggcttgcaaaaagaacttgtaaaatacgtcggcattgcagaagcaactactgctgctttatactcagctagctttatcaataaaaacatttctcgccttgcatcactatcaacgataggcattttaagtgtagctgcttacaaacatttcgaagctggccaaggtaaaaaaggtgcacaacatgcattaaatttattaggtcttgctactttaagtttactagatacattttcttgtaataaaaaatagtcttcattttagaagcacatactttagcacctgtgtacttttgattcaattcataaacggtataccgctatagcatgtgttttattatttttctggtctctttatcgtaaatattccccctaatttagcataatcatttccggctaaacgagaaacagcctgtaatgcgtgtggattgattttaaaatcaccctcataaatactgtcatcaatatgataagttacaatttcacctattattaaatcagccccatctaatacatctccaagcaatatcatttgcgatagtttacattcgaatctcattttcgcatctttaattcctggcgtcttaatcgttgtagatgttaaaagtgataattctgtacgactcaactcactgtcaccatatgctaacggcgctgcagtctcattaatatcttgaacattatcttcgtctgtaatatgcacaacaaagtctccagtccgttctatatttaatgcagtatcttttctcttacctcctgcacgttgaactgcaatagcaatcattggcggatgattattaacaatattaaaaaagctaaatggtgctgcatttactgatgcatcttgatttaatgttgtaacaaaagctataggtcgtggaataattgaaccaattaataatttatagttttctctagcagttaatgattgtgcatcaaacgtatacataatacctacctcttttctaagtatatctaggtatttctccgattttggttaatttaaacatctattctcctctgaaaatcacttgtatttatttagcaaatcttttgaaatatgacacatatgcatatcttctggatatttttctaaatgttgctgatgttcttcagcacttttaatgtagttagacagcggtaagacttccactgcaatttgatctctgtctttacgtcgttcaatgaactgacgcgcttcaattaagtggtcatctacacaactatataaacccgttcgatacttttgtccaatatcatttccttgttgattcacactgtaaggatcaatgatttcaaataaataattcataatgtctgtaattgttaacatacgatcatcgaaatgaagtttgacacattcagcataaccatcatacggaccgtctaatttagagcttcttccatttgctcttcctgcttctgtatgtataattccaggtattgttgcaaaaaatgcttcaacaccccataaacatcctcctgctacataaacaactgccatatttacacctcatcatccttttttatatttttaacaaggttataccatttaataccgccatgacatgattctgatacaccttcattacgatacccatatttttcataaaatgaaattaatgattctcgacatgttaacgttacaccatgtcgatgatgattcttagcaagagtttcaaaatagtttagtaagcgacctgcaataccctgaccttgataatttggtgctacaacaagacctaacacactaatatagccaccttcactattatttgtggagacatttttaaataaatcatcgctaatgtaacgctcttttatgactggaccgttgatgtatccaattacttcatcattcttttcagctacaataaaagtttcttgaatttgttcaattctcaatttcaatgcctctcgtgttgcagcttcttccggtgaaaaaccaatattttcaagtgcaataatttgatctaagtcctgcatgattacttttcttaataccataaaaacacttccttagccctatatatcaaaagtaataccttcatctttatattcattattttcaaactaccttcactataaaaaacgagtctttttattgaaagccattcgccttaatcaattagacaagttgtattatacgaattagtaaataatcatgattataattcattttaagcatactcaaaaagactggtacatgtataccagtctaattcgaaaaaatatatttagttaaaaccatttcaaaaacgacttcacttttcctggcttagtcggtctgtctaaataaacaaaattatcattgattactgaactggcatttcgaagtaatgcttcaatatcattcgaatatttcttcaatttatgattgtgaaataattcttgcatcaaaaatggtctttggtcacatgaatgtgcatctgaagctacaaaatgagccaaattacattctataaattgtaatgataacttttgaatgtttttaccaaatccaccaactaaagaactcgatgttaattgactcagtgccccatttgcaaccaattcatataatatttccggatttttggcgatacttctatttctttcaggatgtgcaatgattggtatgtaacctctcgattgtatttcaaaaaacaattgttttgtataatgtggtacttcgcccgttggaaattcaattaataaatatttcgaacgattaataccttgaatactaccattatctaagcctttcagaatcgaatctgtaattctaatttcttgcccgggaaataatttaatatccaatgcttgaacttctggatgcgttcttaactccgccaatttcacaagcacttgttgaaatgtattatcatatctcggatgcaaatgatgaggtgtcgctacaatacttgttacaccttcatccttagcttgctttaatagtgcaatactcttttcaattgttttaggaccatcatctatatcaactaatatatggttatgaatatcaatcatgattcatcagtcccataatatgcatagtaactagcacttttatctttaggcattctatttaagactacacctaataatttagcacctgttgcttcaataagttcttttccttttttaacttcatctctattattattttccgaattaactacgtagacaacattgccggtaaactttgaaaataattgcgcatctgtaactgtgttcactggtggcgtatcgataattacaaagttataattcatcaataatgtgtcatacaaatttgcaaatgcccttgatgtaattaactctgacggattcggtgggattggcccagacgtcaagacgtctaaatcttgaatttcagttgagataatactgtcttgataagttgaccaatttagcaataaacttgataggccttcattgtttggcaaattaaaaatataatgctgcgtaggtttacgcatatccccgtctacgattagtgttttataacctgcttgcgcatatgcaactgctaaatttgctgcaattgtagacttacctgcgcctggtgcctctgaagtgattacaatgctttgaactgcactgtcaggatttgcaaacataatatttgatcttatgcctcgaaatttctcgctaataggtgactttggttgttcatggacaattaaacttgatgtacttcttcgtgtattcgtcatggtaattcctcgtaaattaaaatttttgtattgaacctaaaataggtaatcctagttgcgattcaacatcttcttctgtcttaatacgcttatctaataattcttttaagaaaataatcaatattgctaaaacaataccaacaataatgctgataactaagttgacagatactattggagatacttttacagcattatcatgtgctgaggaaagtatcgtaacattatcaacactcataattttaggcatgtcatgagcaaaaactttagatattttattaacaattttgtcagattcagatttattcccagtggtaactgatacagtaataatttgagagtttgtttgattggttacttttaaaaatgaattcaactcagctgttgaatactgaccatcaaattctctagatactttatctagaattctaggacttttgataatttccgtatatgtattaacagactgcaaactactttgaacattttggaaagctaaatcacttgaggactttttcatgttcactaatatttgagtagaagcagtatatttgtcaggcataacaaaaaaggttaatgccgcacttactacaagacatattgccggtaaaataagcaataatttaatattcttctttagaatatttaatagttttactaaatcaaacttttctttcatggtttcctccacataatcaatcattgtattcattatgtatgttttataaatcggacaattatatctagtttaacgaccacaaaacatacacaactacattttctctaattatttatataaatattttatcgtttaaaattatatcatgattctctaccattatgtataacttatttatatttttgcacaagatataatattgtccaactttaaatatccaaacctattaataataaaactagataccatcgtactctatcatggctttcttataatcgagcagaagcatcatcattacttgattatttgctctttacaacaccgagcgtgcccgtactcggtaattcaataccttgcgtaacccgtcactgtgagttgggttaatgataataaagcccacaccttttaaaaagatgtgggtaatttatataatttttatttacatttttaacttataaaaaaaagcgcctatgtcatgatttaccatcacataggcgcttatcaataaattattacttattactttccatttcatctaatttatgcggatttcctgtaattagatgacaacttattcttttcaggggaacattacacttttataatatgttcaaagacaaacttaaccattcacaaatataaagaataatattatcaaatcattgaacaaatcgtattttgcaacaattgatatttatattaatgtattgcatttaatttataaaattcatatacatcttaatattctcaatatcgatttgtattgtcaactttatatagatttaaaaaaataatctcatgtctttttttacaaaagtaagttaattattacaaactagtaacaaaaattatttcttcaaaaatatatttagtagcgaatacacttcatctttgaattgacttttactttcttccactgctccaaatttttgcgaaaaggatgctttcaaataccaactttcaagaaacagcaatattaaattctgaaagtcttcttttgtcatctttatctttgattcatcatagaattttgctatctctttacttaatgattgatttaaatcttgtatttgtccgtaaatatttccagaaaattcctcaggcgtattagataattgaacgtacattctaatatacctttcttcgatgtcgaaaataaactcaaataagaattgatataaagcatcaattgaatagttcgatttattttgattcatcataataatattattaaggtaatcaaaacaacatttaacactttgttcgtaaatactttttttcgagtcaaaatggtaatataaactcgctttctttatatttacacttttagctatatcatcaagtgttgtaccgtcataccccttctctgaaaataaggttattgcgttatcaataatcttatccttcaatttttataaccccctactgaaaattaatcacactatgttacaggaaaattaagttgcaattacaaatatttccgtttaattataacaacaatctattgcaaattaaaatactatcaattaccatatggcttacaacctaactaacgaaaggtaggtaaagaaattgcaattttttaactttttgcttttttatcctgtatttatgtctatttactggattgtcggttcaatttatttctattttaccagagaaattagatattcattgaacaagaagcctgacataaatgtggatgaattagaaggcattacatttttacttgcctgttataacgaaagtgaaacgattgaagatacgttgtctaatgttcttgcactcaaatacgagaagaaagaaattattatcattaatgatggaagttcagataatacagcagaactcatctataaaatcaaagaaaataatgactttattttcgtcgatttacaagaaaacagaggtaaagccaacgcactcaatcaaggcattaaacaggcttcatatgattatgtaatgtgcttggatgcagatactatcgttgatcaagatgcaccatattatatgattgagaatttcaaacatgatccaaaacttggtgcagttacaggtaatcctagaattcgaaataagagttctattttaggtaaaattcaaacgatagaatatgcaagtttaattggctgtattaagcgaagtcagacacttgctggcgcagtcaatactatttcgggtgtcttcactctatttaaaaaaagtgcagttgtcgacgttggctactgggatactgatatgattaccgaagatattgcagtttcttggaaattgcatttacgtggatatcgtattaagtatgaaccgcttgccatgtgttggatgttggttccagaaacattgggaggtctttggaagcaacgcgtgagatgggctcaagggggacacgaagtattactacgagacttttttagcacaatgaaaacgaaaaggtttcctttatatattttgatgtttgagcaaatcatctcgattttatgggtatatatagtgcttctatatttaggctatttgttcataacagcaaacttcttagactatacatttatgacatatagtttttcaatatttctactatcatcatttactatgacttttataaacgttattcaatttacagtcgcactctttattgatagtcgctacgagaaaaagaatatggctggactcatatttgtaagttggtatccgacagtatactggattattaacgcagcagtagttcttgtcgcatttccaaaagcattaaaacgtaagaaaggtggttacgcaacatggtcaagcccagacagagggaatacccaacgctaaaatcatcgctaaatattgtaagagaaacagcacttatcgctatatcttgtgtcttttggatatattgtttagttgttctactcgtttatattggtactatatttgaaattcatgacgaaagtatcaatacaatacgtgttgctttaaacattgaaaatactgaaattttagatatatttgaaactatgggcattttcgcgattatcatttttgtattttttacaattagcatattgattcaaaaatggcagagaggaagagaatcgtgaagtatagaaaatttataattttagtgttgagtatcttgatcatattgcctgtaagcacactggatggtcatcatattgcaaatgcagatgacgattcacctaaaaaactgaaatataaagaaaatagtgctctggcattaaattatcaccgtgtaagaaaagcgaattttctgaataattttatttacttcttttctagtagtaaagaaattaaaaattatagtgttagtcaatcacaatttgaatctcaaataaaatggctaaaatcacatgatgctaaatttttaaccttgaaagaatttttatattacaagaaaaaaggtaagtttccaaaacgaagtgtatggattaactttgatgatatggatgaaactatttatgaaaatgcttatccaatcttaaaaaaatataaaataccggcaactgggtttattatcacaggtcatgttggggaagaaaactttcacaacctcgatatgattagtaaaaaagaactaaaagaaatgtataaaactgggttatgggaatttgaaacacatacccacgatttgcataacttatctaaaaataataagtcaaaattaatgaaagcttctgaagctacaatcataaaagatttaaacaaaagtgaaaaatatctaactaaaaactttaaaaagtcgcagaaaactatagcctatccttatggcttgatgaatgacgataaattaccggtaatcaaaaaagctgggttaaaatacggtttttcattagaggaaaaagcagtcactccgaactccaatgattattacatccctagaatattaattagtgatgatgcttttgagcatttaattaagagatgggacggattccatgaaaaagattagacttgaactcgtatatttacgtgctattatatgtgcaattattattatcacacatttacttacacaaattactttaaaacatgaaaatatggagggtggatccttagtgttacaattttacattcgtaatattgtgatttttggtacaccttgctttattatcttgtcacagttactgacaaccttgaattaccaaaaagtcacctatagatacttaactacacgcgtaaaatatatacttattccttacatattaatgggattgttttacagttatagtgaatcattattaacagattcaagtttcaataaacaattcattgaaaatgtcctattaggtcaatggtatggctattttatcgttgttatcatgcaattctttattttgagttatatcatttttaaaattaactataacctattcaacagtaaaatattattattgttatcttttattttacagcaatcatttttatattactttacgaacaacacagcgtttcacgataccgtgctacactattatccattaagtgaaaatactataatattcggatggattttttatttcttcttaggtgcatatatgggttataactacgaacgtgtattaaatttcttagaacgttatttagttattatgattgtattagctgtagctacttattttgtgtttattgcgttagcaaatggagactattggaacgttaccagcttttcatattcattaacaccatataatagtattatgtttattgttatcttgggtatttgcacgcattttaaaacaatgttatttaatacgattcaaatgattagtgctttctcattctttatttatttattacatccaatcattctagactcattgtttgcatatacaaatatatttgaggataatacaatggtctttctagcgatatcactactattcattttaggattatgtataggtgtcggcatgatattgcgtgaattctatatctttaggtttattattggaaaacaaccatataaattgaacattaatgcttattaattattaagctatgttaaaaacacgcggtgggcgaaatcagtttgaattgactgacttcgttttaccgcgtgtttaatattgttatacatatattctaattgcacatttaaacttcgtaaatgccaatgggagtgggacagaaatgatattttcgcaaaatttatttcgtcgtcccaccccaacttgcacattattgtaacctgactttccgccagcttctatgttggggccccgccaacttgcacattattgtaagctgactttccgccagcttctttgttggggccccgccaacttgcattgtttgtagaatttcttttcgaaattctttatgttggggcctcgccaatgttttacttgaataattcttttagaattctaaataatgatccgattaattgaaagaagtctgcagtcattattaattcctccctttactttataaattatgcttgcttagtatcagtcagcttttcagttttcactaaatcgtctgctaaatgatgccaaaaatcttgtaattcttctcttgtgcgcactgtatcagaactgtcttgtcctacaaagtcaacatgatcccaatcatgttttgtaggcgtcacttgccaaatgcctttttgaattttatctgtcgcttttgtataagcttgattaaatggatgttgagaagaaataacggatactaaaccatcgttttctcgccattctttttcagtagctttaccgattaagttaccagtaatcacaaatgggaaaaacatatttaagtctgctttttgtctatcgctatttaatgctttgtgcgttgcttcaccagtgtatgttttatacacaatgttagggttcaacgacgttttacgatttaaatctgttgcaccctcacgcgtcagatcgtaaaatccattatcttttgatttccataaattagattgtttaacgcgtttgacataatcaatatatgattcatttggcttctgttttagaccccattgagccaacccgaagtctactcttgaatttttattaccaaacattttaccgatatcaaatacgatttgtctcactaaagcttcattaccagctaaatctgatgcgtgtgtaccattatgtggtgttcctaaagtagtaattgatgaaatcatattgtcatgattacctttgaatagtggagaaatttcgccaccatgtttcttttgatactctatttcttcacgattaccattacgcagtaattcttctagttgacgtatcgtttgaccgcccatactatgtccaactaggtgtaccttctgtcctggtttccagtctttgtaaattccttcgtatgtttttccataacgttcatgtccatattttgctgcatgtgctgcaccataatctacacgaccgcctttgatataataataaagttcaactgcgcggtcatagttacttccaaaagcacttatacttgcttcataagctttgtaaccattttcttctaaatcttggcgaatgttcattttattaccgccccaataatgagctaacactgaaggattaatatcatctgtaaacccattgaaaccatgcactaaaacgataggatcctgatttttatactgcccttgtttggcaactttattcgtttgatcatctttcgcttttgcagtaagttcctttgtccctttgtttggtaacgttgctactgcactactttttaataaatttaatccatttttcttgtcattgtcctttgttggttctactggtgatttttgattgttttttaaatctgaaactgatagtgttttttcgtctttttgaggtttcacttcttgttcattgttaaaattgtagttagtaattttatcattcgcttgattattttgttgtggttgtactttctctatttctgtctcattaacaatttctcgttgacttgtttgatctaacttatttaatgatggtgcttcctttattcgactttgtgaaggtagattgttattagcgtttgaatcttgactattatctgcctcttttgactgttgctgtgacgccactttactttgtttaccatcattaatagcctgttctaacccttgatttacatcgctaggattagcattgttattttttgttgtatcacgttgaatatttttattattaagcgatgattttttatcatcctttagttgatctttattcaaatcatctgttttacgatgattttcttctgatattgttttatcattatgcaagttcttagttaaattttcagtatgttgctgttcgtcaacaccgttttcacgttgataattagcattttccctagtttgttgatccccaatagattgtgctgtaactgtatcctcctgtgaatttcccatattcacttgcttctcagctgcttgtgcttgtccaccacttaaaaatagtaatgtagctattaaaatggaagatgcacctacactaaatttacgaatactatacttattttgacttttcatcattgtcagcacctctatttttttattttagataaacaaattgataattattcgaggaataaactcaaataatttacttaaccaagcactcataatgaccatcctttctattgtttaatttgacgagaaagcgtttacatttgtatttaaaaaatatattctccaaagagaatttaaagtgtatacgctaatcatttcaaattattaattaatattatatttggcaaaatttaattagtcaataattagacacaatttaattatgcaaattgtaacttttttacatatatcttttttgatttttaatatttacatgcttggggcttaattccaatgatgtattatttttttagattagctatatggggagatttatgagctattacagttattatgtttgctggtgtcgtattttaaacctaaaaatatcatcccatccacaataattgtatcaggataaaccgtaatacttgttcctaaactaaatatatacagttaattttcttccctcaaagtaagtatcctactatttttaatttattgtttaattactcttgaactacctttaacttaatctcgaatttatgatgattagcataaaaatacatcccataaagttagttttttagtctaactttcgggatgcatatcttagttctaatggagattgtcttttaaataggctatgacatttctatttcaggctagatatatttgtatttatagtataaatacaaagaatgtaaagacaactatgatattaataggtagtaacgacaaacataactctttagctttttcgccattttttcccttcataacttcattatatcgattcatatacttttcgacatctttaacagtgacatctattcctgagttgctcaatttactttttataattatttttgatttcgtattgtgattatccactacttatctataacgagttcgcaactttagtaccatcacagcattcatagttaaaatatgttggtgtcgtattttaaacttgaaaatgtcacgttttccacaatatttgtaagtgtataagccatgatccttttccttatatcttagtccatacttgctttaccactgttcgatattttgtcgttcacctttaaagttattgcgcttatgatgtctacgcgctaattccgcctcaatttctgaaaaatcgacgccaagcgcatgcatcaagacaaataaatgataaagttcatctgctacttcacttacaaatgcttttttgtcacctttaattgcttcaattacgacttcaaaagcttcttcaccgtatttttttgtaatcttttctataccttctgttaataaatattttgtatatgacttttcattattggattgggcactatcttgaactgtctgcgctaatgtttgcactgaaaatggaacttctgtgttgaaacaactttgactgcctgtatgacatgttggtccatttggtatgacatcaattaaaatagtgtcattgtcgcaatctacatgaatatctttaacacgttgcgtatgaccagatgtttcaccttttgtccatagccgttgtttcgaccgcgaatagaaacataccacaccatcttctatcgttttatcaaaagcttcttggttcatataacccaacatcaatacttgttttgtttgattatcttgtaaaattgctggcactaaacctttgctaaaatcaattttatatttggtcatcttactgctatacccccttgccgtatcacttctttaatagattgaaccgtcgtttctcgatcatgtaatatacttgcagctaaacctgcagaaacatccgtctgatcaaataattctacaaagtgttgtgcattgccaccaccaccagaagcaatgattggaatatttacaagagacttaatatttgctaggtgttcaatatcaaagccttgtttcataccatcatgtcccatacttgtaacgaggagctcacctgcacctaactgttctacttgctgtacccagtcatatactttaatatttgtcatttttttaccaccagtcgtacaacaataatgtgcttttctttcaggatcataatagctatcaattgctatgcagatgcattgtctaccgaatttatcactcgcttgtttaatgagctgtggattttttaaagcacttgaatttaatgatactttatctgcaccatgatttagcaattgggtaatatcatcgagactttgaatcccaccccctacagtaagagggataaacaagcgtgacgctgtctgttcaatcacttctagcattaagctatgaccctcttccgtcttagagatgtctaaaaatactaattcatcagcacccgcttcattgtaatacattgctaaatcaacaggattcccaatatcccttaatcctttaaattgaatccctttaacgacacgaccatctttgacatctaaacatggaatgatacgttttttaatcattttagcccctcccaaaaagatgcttgatgtgcagcctttcctataatagcagcgtgaacatttagcgacgctaatcgttgaatatcttgctgatgtctaataccaccggaagcaatgacaggaatcgtcgttgcctttactaattgaccagttaattcaaagttaggtccggacattttgccatctttagcaatatcagtatatataatgccgccaagaggtatatccgataaccgtctcacaaaactaaataaatttaactctgtgtcctcttcccatccgttcactttaatatcttctccataggcatcaacagataaataaatgcgacctggaaatgtatgtgccatctctttaagccaatcagtatcttgaatacctttcgttccaactatgcaataattaatccctgcggcaaagtagtccatgatttgtgacttcgtacgaatgccaccacctacttcaatatctttggttgttaatctcctcaatgacttaatataatcaaactctcgggcatgctgtgccttagcacctatcaagtcgacgatatgaatacgattcacacattcaaattgactatagtaagcaatactttcttcagccgagcgtgacattttttcttcactatcatatttaccctctgttaacctcacacttgttgacccaatcaaatcaatcgctggccataattcaatcatttataaatcccccttgtattgcctgacgcaaaatttgtaacccatatgtaccgcttttttcaggatggaattgaataccaatataattgttaaattgaacaattgccggaatatcagccccatactgcgcatatgcaattacattttctgacatcggcgcttgataagaatgtacgaaataaacatcttgatttaacatagggtgcttactcactaaattattccagcctaagtgtggcactgggtattctgtttggatacgcgaaatatttcctgggataaaccctaatccagatgcatcgccttcatcactatgctcatacattaattgcatgcctaaacaaataccaatcatcttcttatcagtattcttagccaatattgcattgagatttaatcgttttatctctgacatcgcatctttaaaatggccgacaccgggcaatatgattgtttctgcttgatcgattatttttgaggtatttgagacaaccacctcataccctaaatgttcaatagcgcgttttacattactaatattccctaatccataatcaacgatgacaatcattcaatcacacctttcgatgacggcacacgctgatcatcagttgcagttagcgctatgcctaatgcacgggaaaacgctttgaatatagcttcaatttcatggtgtgtattacctccacgaattaaatcaatatgcgttgttaatcttgcattgattacgaccgctctaaaaaattcttctactaactccgtatcaaacgtaccaactttttctttacttaatgatgcattgaatgataggtatgggcgcccacttatatccacaacgacacgtgctaatgtttcatccattggaatgtacatcgttccataacgaacgaaatgctttttatctttaatcatttcaagtaacaattggccaatgacaatgccgatatcttcagttacgtggtgatcatctacgtcaatatcaccttgtgcctcaatgtttaatgacagaccgctatgaaatgtaaacaaggttaacatatgatttaaaaagcccacacctgtattaatatgcgatggtgactgatcatcagatattgaaatatttagttgcgtttcagctgtgtttcgttgtttttgataaatcatattttgcactccattctttaacaatttcttctaattgctttaactgtgatgctgttgcaattgagtatcttacatagcccttcatcaccggctcatcataaaagcgaggtttaaatccttgttcatatacgtattgtcctaattgttgcgctgctgagcctttagtaagtacaaaattagcatttgatgggaacactgacattttatctgcaacatgtgtatcaaatatttgttttaactgctcagctaactgtcgttgcatcgttaaaaattgtcttgtctcttctctatgtctaaaaatataagtcgcaatatttagcgtaaatacatttaatggatatggatgttctattttttgaatatgctttatcgttccagcagtactaattaagacacctaatcttaagccggcaattccaaacgcctttgataatgtacgcattcttaagatgtgtggtgccagttccacgtcatatgccgtaccataatctaaatatgcttcatcaatgacaaagtatccgtttaatgctttcatcttatctgcaatagctgttaaaaatgccgtatcaaattgcttgcctgaagggttatgtggattactcataataaaaaatgatggttgtacttcatcgattttcgttaaaatggtttccaaatcaaacgttaaatctgatcctgcatctacaaatgcaatttcacgatttacttgtgccgcatatgcttgatacataaaaaaatcaggatttagcgttaatgccggaccttctggcatgatcagcattaacttttgaatcaattcatcagatccatttcctgcaataatttgttcaggcgataatccgtaaaacttagcataagcttccttgaattgttcatatgctgcatcaggatataaattatatggcgttgcactaataatagacgtcattgttttttcatccaacggcgtaactggactttcatttttatcaatataaatcatttcaattacactcccctaagactgacgtattaaaatagactgctggtgattgtataatgcttcaacatgagcaatatgttgtgctgaatcagcaatttgttcaaacgtatcttttgataaatggatgaccgtgttccgtgttaagaaatcattgaccgataacccattggtaaatctagctgttctatttgtaggtaatacatgacttggacctgcaacgtaatctcctatgacctctggcgaataatgtccaataaacaatgcacccacatatttcactttttcaatatatggttgaggatttactgtttgaatcgacgcatgttcaggcgcgattgtattcatgacatggcatgcttcatcaaaattactagcatggataaggtagtgttgattagcgatacttttagaaacaatgtcgtatctgtccacattaggcaatgctttagcaatacgtgattctaaatctttaaggacttgcgcatcttcactaatggcatatgtacgtgctaattcatcatgttctgcttgtgcaaaaacatcatatacgatggcatctaaatctgctgtttcatcaataataagtgctatttctgttggtccagctatttggtcaatacctacttgtccaaataaatatttcttggcatatgcaacaaattgattgcctggacctacaatcttatcaactttaggtatcgtttctgtgccataagttaacgcagcaatactttgagcaccaccaacttgaaatacttgatcaacttgcgtaatatagcatgctgctaatacttcttgagacacaccattaggttgaggtggtgtcacaacgacaatattttccacacctgctacttgtgctaacgtcgctgtcattaataccgttgaaggataacttgctttaccaccaggcacataaataccgacactttctagtggatggtatatttcataacactccactgattcttctaactgttgattcgtctgtttaatactttcttgatatgctttaattctttcataactttgttgtaatgcttgttttgttttttcatctaatgtgtcaaatgctgctttaatttgttcatgactaatttctaaatgatctgttttcgtatgatcgaatgttagattatacattttcaaagccttatctccatgaactttaacttcctgacaaatatcgcgaataattggatacaatgactcatctaatggtgcttctaatgaaaattgatttaaaaattgttgtgcattaagcattggcaatagacacctccaaagagcgaataaattgctctattaattgtgattttttaaaataagctgctttattagttattaatcttgcattgatatcactaatatgttgcttttcaaccagtccgttcgcttttagcgtagtacctgtttgaacgatgtcgacaattccgtctaccatatctacaacacaggccaattcaacagagccattcaatttaatcaattcgacatcaataccttttgatttaaaatatgtttcagcagtatgaacataactcgttgcgattttacgataattggtcgtttcaggtttcgctgcaaccgcaaaatgacatgctccaaaaggcatattcaacaaattattaacattatattggcgctcatctaatatgtcgctaccaacaatgcctatgtctgccattccttgttccacatagattggcacgtcacttccttttactaaaatgcattcaatattatctacacttaataataattggcgttctctattttttaatgtttctgataatgtcgtatattcaattacatctaaatagttaattaaactatccattagacgtcctttggctatggcgattcttaacattgtgcatactcccttacttaaagtgttaatcctaatccaaacccttcgatgcttcctttgtaataaccacctgttaaaactcgagattcattttcagcaaaatgacattgaataaataaacctgtgtaataggatctaggtggctgcgcagtaatatctaaatggatgtctttgtaaccttgtttatgtaaccaacgttcccatatttttaattcaacgagtgctggatggtcatttggaatatagtgttccaatacatttaattgttgttgcgtattctctttcaagatttgcacgattggatgttcagtcgacaaatatgtaaccagtcccgataaattacgttcctcaatcattgatagtatgtctggtgtttgtaacgatttatcgagtaaggcatcaagcaattgataatgtcccaatacaacaaaatgcacgttgtctctcaactgctgttgaataaactgaataaagagctttaagctctgttgcacattcgctaatgatggtgcatagttttccaaaccaacttgtacagccgcttcattattccgaatgattaaacctgtgtatgccacttttgttgctgcagttggatacattgagtaataacgcaataattgatctgtaaaatcatttcgaagtgcataaatttgatgctcatgttgccaaaaatttcgctcacccatctgctgcaaatcctcatggttcaattgtttccagtccaacttttcaaccacactaaaatcaactaactcataatccgctttattaaaatattttaaaaatgctgtttccgattcttttaacgcaattaattgttctgaattattcactcgaccaccctttactttcaatactgtatttaaaatcacttggtattttcgttgtttgctttacttctctaccacgctaaagtgtaatatgattaataacttatcatttttagcaatacattacaacctttttcagaaaattcggtgtattgattttaaaattttttaaaataaaaaaggcaagacatttgtgcctataaaaatgcttaaccaagatttttatattgaagttgtacttcttgcacatattgtccttgccttattatgtaaagttattttctttctatctttttattaaatttaactattcttcataatcccgattccctttaaagtaacgtctatcttgtttactatatacattttcaggattaaaaaacggtttgagtttatatttaaattcaaataagtttagaccatcaatcgcaaccctatcttggtaaacgttcgttgctgatatatctgtaaaattgtttggaccgacacctgcaataaacttaaactctgcttcatctaccaaataatcatacgcttgtgtatgtctatcctgtgcgccatgtggaaatacaaacatatctgttttacctacaattggttcaacttcatctttccatcttttagtatcacgtttaataccttctaaagatgttttttcaaaattaatgtgaccatatgaatgactcgcaaatgaccatccatcccgtttcattgcgcgaacaacttcctcagctgcctttttattctttgtataatctttactcgttaattcattcgtgcgataacctaatacgccctcataaccggttaaagcaacaacacctttttcaccatttaaagaaaaatctggatgctcttttacaaatttatttaaaattggcacgatatcattgtcatcagaataagtagcatggccttttttgtctgtagtttcagaaacaacatgtttatttttatcgagtactaaacggtcagcataaccatggtgtctcatgtaactatagtaattcatatcatcaattgagatgattagtggctttttacctttcggcaattttatttttttggcttttacatgatgagatgataagtcgtatacatcatgtggattaacgatgatgtaattatttttatataattcgttcaatgattttttaaattcacttacagtaatcatccaatcattgttgcccttagcttggtgtgtatctcctgtaaacgcaacttttgggtctgtaattaatgggtgataaaacacatgataaacttggccgtgatatgtttcccaatgttcatccattttcgatttatgctttgcatactcatttggattaacagatttattttgagctttctcattttgcttggaacagctatataacaatgcaactgataataacagaaaaaatagcaataaatattttttatgcattaaacattctccctatgttttattatgcacaattataacatttttattatgtggctcataactttttaagaaactgttgggattttaattttattttttagataatgtcatagtattttatttataaaacacaatatctccttgattgataatgtcgtccatagtatcgtctcgcttgaatttaagcctttctgctaaatttattgaacgttggttacacttatttgtcctgataacttttactgtttcttgatcgatataattcacaaaatttgtgattgctgtaatagcctcacatgcgtacccttgtccttcaaaacttggatgtaatttataaaataaatttaatactgtttcttgctttaattgtcgatattcatatccacaaataccaataacactacaatctattttttttaccaatacaaagtaaccaaattgatattgttgccaatggtttcgccatttttcaatccaccgttgtgtgtctaatttggaattatgtaaacctttgggagtgtatatatttgcttgtggatgactacaaatattataaagttcaattaaatgcgaggaacttggaatcattaaatttaatctttcagtatttatcattaaatgtctccctcctatttctatttaaagactatttatatgaatactaatgccacgggttgaaatatcgactattatttaaaaagaataatgtaactactaacatcagaagtattaacgtcaaacacaaaacaacataatcatctttttttaattgttttttgacgtaccaggttctccttttatactgtccgaattgtcttaactccatagcagtactaatagtgtcaattctttcgatactagaaaatattaaaggtaacacaatgcgtttgatacctttaacacggctagtaaattttgcttttttcgaattatcatatcctcttgcttgttgcgcttgtgaaatattaaaatatgtttcttgaatatctggaatataccttaatgctagtgagactgcgtaactgattttataattcacacctagctgatttaaacttgcagcaaaatgactcggattcgttgtgaataaaaatattaacgctaaaggaactgtactaatatattttaatattagattaaaaagatagaataattcctgtgatgttagcgtaaatcgaccaataccattgactaactctgtacgctgattataaatcttcacaccatattcagggtcaaatatgtacacggcaataatatttaatattgtgaaaaacagaatgaatttaacaacaaagcgaacttgtttccattcaatatgagcatatttgaccaataaaatagatgaagcactaattaaaattaaatatcttgtgtcataagtcaccattgcagaaatagaaacaactaataagaataaaagtttaacagtcgcatttaattgatgaatacgactatttcccgggtgaaaacctatagtattatattgattcattggcgtctcaccttcctatcatggttaataaataattgtactaatttctgtggctcgctaatccctatatattcggccatttcaaatagcgatgtttgtctcaatgatgcaatctcacagatttttttatcatttaaaaccaatactggcgtggtatcagcaacgacttgaccttttgataatacaactgttcttgaactatactcagacaataaatgcatatcatgcgtaatcataataatcgtcttcccctgtctgtttagttcaattaaaaatgacattatctcattataatgatagaaatcttgaccagcagtcggttcatccaatatgattatttccggatttaagactaaaacagatgctatagtgaccctctttttttgaccatagcttaaagctgcaattggccaattccgaaatgcataaagtccgcatattttgagcacattctctactcgtatctttatatctgattctttcatacctcgtgctcttaaccctaatgctacttcatcgtaaatcattttttcagaaatcatatgatttggattttgcatcacataacctacgaattcagatcgttcgctaattgacaattgattaaatcccctattacaaaattggatattacctgttatatctaaaaatccacaaattgctttagcaagtgttgatttgccggcaccattgtgaccaactatactaagcatttcttttctataaacatttaattgaacattattaagtacactattactatagtcactatattgaacacatacctcatttaattctaatagcggttcagatttgtacttattatcattatttgcagatgtttcatctatccattttttcactttaaatttaacatgttcactcatacaaacgtcacgtaaattcgctaagttatcaatggattcgacatctacttctgcatatttaagcgctgtacagtataatggttcacgtatgcctgcttctttaagcttagatgattttagcaaatcactaggcgttgtattagcgatgatttttccatctttaaaaagaagaactctatcaaacgtatcatctaatgattcttctaatcgatgttcgacaataatcatcgttgactttgtttcttcatgaatattgtttaacaatctcagcgtttcatgtcctgtcgcaggatctaaattggccagtggctcatccaatattaaaataggcgtacgatggattaatataccacctaatgaaacgcgttgtttttgacctccagataaatcttgcggtcggtgatttaaatgttctatcatgccaactttttcagcccaataacttacatttttcttcatatcatcttgttcaacacaattattttctaataaaaaggccatatcttcagctgctgttaagcctatgaactgtccatctgtatcttgtaaaactgtaccaacaacattagatctatcatgtaaacaactaacggttgcatcttgattatttatatatagttccccagttatgttacctttagttttaaatggaattaatccgtttatgcaatttgcaaaagtcgatttaccactacccgaagcaccaactactaatactttttctcctggataaatatcaacatttatattctgtaatgtaggtgttgcttgactatgatattgaaaactaaagtctttgaacgagataattggttcagtcatgatatatcattacctttctatattcatttacatatctgattcaacaaaataactattccttacgtaaactaccttttttaatttgagatgaagcatatgcttttaataatattgtcccaataatgccaactgaaataatatttaatactgcagagataacaccttgtgtataaaccttgttagctggttcgttataaatcaaaatatctaatgttggtgcaataagtgcccagcaaataatattcgcaataatttgaccgatattaaaataaaccatcgatttcctagaaaatcggcctgaagaaagatttaattttagtccaatccagccatataaacagcctataattcccgagcaaataacccaactccaccaggcactaccgtatgtcgtaaaatctttaatagcatgtccaactaatccagtcattaaaccagcaaaaggtccaaatattgcagatattaatgctaaaaatgcatatgatgtttctatattcgtattaggaaaacctgttggtattacaacaaaacgccctaaaattacaaataccgctgctcctataccaattgcaacaacagttttaactgaaatatcttgttttttcatcttcattactccttacataaaaaattcattatattgatggtgctttagataaatgaatcgtccaatcatttccagtaccaatatgatataaatctgaaaatgagtcttgattgactgctacaccaatatttactagcgagttaacatacacaagaggttcacccacattaacatctgcaaacgatcgcgcaaatttaataatattttgatagactttcttatcttgatgataaattgttaccaccaaattattaccatgaacaatttccaaggattttaagaatgccaatggaatatttgtccataatgacccaaatctgatatctaaaatatcaatgcttcctgtaacagaatcctcattttttgtcacttctcttatttctaatgcctcaatactatcaacattaattgcctgaccgagacgttcaaacgctatcttatttgcagctaatctcgcaccattgtatgcataaacatctctaccatgaaaagtatgactttcttccgaatgaggcaatcggcttttcacttcatcaatttcgataacttttttaataccttcgtaatgtttaatatgacttaaagaaccattatcaggtgtaataatgtaatgacctgaatatgttaagcaagcaatgctccgcctatcactacctacacccgggtctaccactgatacaaaaactgtgcctttaggccagtattttacagtttgatataaacgatatgacgctacccaaatgtcatacggtggtatatcatgcgttaagttttcaacacgtatatcatcacttacagtatatgcaactccatacattgcacttacagcgccatcactaagtccaaaatctgattgcaataccaaataatttcccataaaatgcctcctttttttaaaacttcaaaaaaatattatctacatatttaatgttctatattttgaattttcagaattatattaaaatagtacgagtcacttgatgcaaagtcaatagtagtgactataaaaatgataataatagtcagatttatctcattaactaaatttcacggacttgtaatcacttctttatgtttgaattaattgactagggtataacaatagtgtggtgttttataggtcattctttaaatacatcacagaaaatattcgaattcgaaataaaatgcttgcatctttgttttttaggtggtattgtatgtatatcaagtataaaaaatatatctaagagataaaaatatggaggttttatattatgactaactttacttttgatggtgcacacagtagtttagaattccaaattaaacatttaatggtttctaaagtgaaaggttcatttgatcaatttgatgtagctgttgaaggagatattaatgacttcagtactttgaaagctactgcaacaattattccaagctcaattaacactaaaaacgaagcacgtgataaccacttaaaatctggtgatttctttggtactgacgaatttgataaaattacatttgtgacaaaatcagtatctgaaagcaaagttgttggtgatttaacaattaaaggcatcactaacgaagaaacattcgatgttgaattcaacggagtaagtaagaatcctatggatggttctcaagtaacaggtattattgttactggtacaatcaatagagaaaaatatggcattaactttaaccaagcacttgaaactggtggcgtaatgctaggcaaagatgttaaattcgaagcatcagctgaattctcaatctcagaataatctcattacacaatcctcattgttttaatatatatacgaaatgccaactatatcatccctaggtatagttggcatttttcgtttaactcatgtgtaacaagcactaactgttcaccctaattttagacgcctttcattcaggtaggtcttattgaaactgaaaactttgatgaccttttgcaaagccattaactgtataaagcatagatcctccgcccatttctatatcattggaacaaatgatgagttgatttgttccaggtataaattgcggatgagtagaacgtaacatatgcccttcatctcggcctggtatcaatatttgtcctattggataaccccttttattaaaaactaacactcgaccttgaccatacattgctacgtataaattatcgtcactatcaatacaacatgagtctggtccttcatgacctgtaaaatagtacggtatggtagctccaaatggttgtatcgtcacaccatcatcttcaagtgcaatgcgatgtaatcgattggctgttgtttctgttacccatagtactttttcatctgtacttaaagcaataccatttgctacgctaatattttgaatgataggcgtcactgttctaaagtccggcgaaacataataaacgcctcctagtggattggtagagtatcctctaaaatctgtaaaataaaatccacctttagaatcaaataccatgtcatcaatacaatatgctgttgaaagatcttcaataatatcttgtaagttgtcaccattttctgtagctgcaaaaatgcctcctgtagatttaaaatctcctaaataacaaacgaataatcggccatctttatgtattttgattgctgcaggattcgctttgtgacttacaaaaggtcgtttgatttccttcgtttcaggattgattttgaaaatattgccttcgaatacatccaataaaaagagttgtccctgccgatcaaagttcaatccttctagttgcaatccttttttggaaatttcaagccatggttcagctgtaattgtttgtaattcactttcagatataattggaacagcactattggacttcccgctataaaataatgtaggtaaatcttgttgtgacatcatgatcattcctttcatttcattcgttttaactatcaattttattttaaacaagataactatcaaataaaatgataacggtttcatctatctattttatcggtctagtggctgatttcaagctagaaatattgaatgacaatacaactctgttaaaatgatggacgtagacaaatatgcgtattgacgctttattttaaaaattaacatgcttataacatgtttatagaaggagattaacctatgaactatcaagttcttttatattataaatatatgacgattgatgaccctgaacagtttgctcaggatcacttagccttttgtaaagcacaccatttaaaaggtagaattcttgtttctacagaaggtattaacggcacattatctggtacaaaagaagaaaccgaacaatatatggcacatatgcatgccgatgaacgattcaaagatatggtgtttaaaattgatgaagctgaaggacatgcttttaagaaaatgcatgtacgtcctcgaaaagaaatcgttgctttagatttagaagatgacgtcgatccaagacacacaactggccaatatttatcacctgtagaatttagaaaagctcttgaagatgatgacacagtcattattgatgcacgtaatgattatgaatttgatttaggtcatttccgaggtgcaattcgtccaaatatcacacgttttagagatttgcctgactggattaaagagaataaagcgttatttgcagataaaaaagtggttacgtactgtactggtggcattcgatgcgaaaaattttctggatggcttttaaaagaaggtttcgaagatgtagctcaacttcatggcggtattgctacatatggtaaagatcctgaaacaaaaggtgaatattgggacggtaaaatgtacgtatttgatgaccgtatcagtgttgatatcaaccaagttgaaaaaacaattattggtaaggattggtttgatggcaaaccatgtgaacgttatattaattgcgctaacccagaatgtaataaacaaatattagtttctgaagaaaacgaaactaaatatttaggtgcatgctcttatgaatgtgctaaacatgagcgtaatcgttatgttcaagcaaataatattagtgataatgagtggcaacaacgtttaacaaactttgatgatttacatcaacatgcttagttttaattaaatacctttcaaaacacgctttgaaaatccgatttataaaggtttttcaaggctgttttttatgcgcatacataacctgatatgtttttaattatgcgcgtgttatactaaattaaattttaatactgcggggtgtcttaaaatgcacattttagtaacagggtttgcgccttttgacaatcaaaatatcaatccctcatgggaagctgtgactcaactagaagatattattggcacacatacaatcgataaattaaaactaccaacctcttttaagaaagtagataatattataaataaaacgttggcatctaatcattatgatgttgtactagctataggacaagctggtggtagaaatgccattaccccagaacgtgtcgccattaatattgatgatgcacgtattccagataatgatgattttcaacctattgatcaagccattcacttagacggtgcgccagcttatttttcaaatttaccagttaaagcaatgactcaaagtattattaatcaaggacttcctggagcactttcaaatagcgcaggtacatttgtttgtaatcacacactttatcacttaggttatttacaagataagcattaccctcacctacgattcggatttattcatgtgccatacataccagagcaggtcattggtaaacccgatacaccatctatgccattagaaaagatagttgcaggtttgactgcagccattgaagctatttctaatgatgaggatttacacctagccctgggcacaacggaatagttataagtgcacaaacaaaagcaccctaatttgttagtttaagtctaactttagggtgcttttggatgattggtatacagttttactataatgatgtattttagctaaacgacattgtttagtcttctttttttaacttcctaaaatttacaaatgtataaataataaatgctatatttagaatgatgagtatacttactgaaactaaattaaaagtgtctggttctttactaaagatagctgctatccttgctatcaaacttggcaatgaaattaccaacacgatgagcgcataaattttctgtttaattaaaatacaagttccaatgagcgcaattaaaagtactaacccaacgatgaaactctgtttgtcacttaactcaaagaaactatagataggatattttttaataatcaagccacctaaaatcatccataaaaatacgataattccataagtcacatttataacatacgttattttttggtcaccaaatcggactaatgtatttcgtagaatcagcataccaatgacaacacctaaaataacgatactagctatataaagtaaaaatgcaattgtcacatcaaatgtacccaaatctaaaaacctaggaattataatgactgctaaaataaaagcgaagtacaaagtaatatatttatacaaaccggtagtaagacttatctcaggtgataattgatcagccattgacttaatcggtgtattaataattgaacttgtatcttcgttatttttttcagccatagttaaatgatcttcgagctcttccaataactcttctacttctgcttcagtcttacctctaaataacaattcaacacgtaatttttctaaaaaatcttgagattgtttacttaacatcgttttcccctccaaacaagttaatcatccctttattcaaaacttgccatttcgatttaaatacttttagttcctttaaacctgaatcggtaatcgtatagtatttccgcctcgggccgccattactagatttttttattgtcgtatcaacgtatccttttttgtttaaacgcattaaaactggataaatactaccctcacttatctctggaaactcttgattcttaagtttcgtcataatttcatatccatacgtttcgccttgggcaatgagacctaatatcgccccatctaagagacctttcataatctgatctgacactgacattttaatcacctactatcttacataataagatagtacattgagaacttttcgtcaactatcttttattgtaaggtagttgttgtacacattccttaaatgactaacaactttgttaatagggtaatacttacggaagtatattttatttatgggggaggaattaataatgactacaaaaacagtatttgatgtcattgatatggggttaggatatttagtaaatgtgtatgatgcttggaaagttgaaaaggtacttgatgattatcataagcctttttctaataccattcattggcaatttggtcatgtattaacaatttttgaatcggccttagctgttgctggtaaagagaatattgatttaaatatctatagacctttattcggaaatggttcgtctccagatgaatggaaggatgaagtaccgagtattgaaaggattttagaaggtctccaaactttacctgaacgtgcacgaaatctaactgaagatgatttagcaattgaattgaaacagccaattgtcggttgtaataacttagaagagttattagtattaaatgccattcacatcccacttcatgctggtaaaattgaagagatgtctcgtatattaaaaaatttaaaataaatatgtgcttattaaccgttaacaacacgttaacgggttttttatttgtttaaaaggtcacttttttgaatttaataaacaccatctataccagttcttcaccgattctcgaaaaataattatattaatgatttcgttaatttaattttatatttaattattactgtacatcttttgtagttagctttattcttaaattgaaatatgtataaaacatagaaagaaggacgttttaacatggaaaacacggttaaatatcgtaagtttatactccctatcgttgtaggtctccttatttgggcacttacaccttttaaaccggatgctgtggatccaacagcatggtatatgttcgcaatattcgtcgcgacaatcattgcttgtattacacaaccgatgccaattggggccgtctctataattggatttacaatcatggtactcgttggcattgttgacatgaaaacggctgtcgctggttttggtaataatagcatttggttaattgctatggcatttttcatttcgagaggatttgtgaaaacaggtcttggtagacgtatcgcacttcatttcgtcaaattatttggtaaaaaaacattaggattagcatattctatcgtcggtgtagatttaattctagcgcctgctacaccaagtaataccgcgcgtgctggtggaatcatgttcccaattatcaaatcactttctgaatcatttggttcgaaaccgaaagacggatcagcacgcaaaatgggtgcatttcttgttttcacagaattccaaggtaatttaattactgcggctatgtttttaactgcaatggccggtaacccccttgcacaaaatttagcatctagcacatctaatgttcacattacatggatgaattggtttctagctgctttagttcctggacttgtttccttaattgttgtaccttttattatttataaaatttatccaccaactgttaaagaaacaccaaatgctaagagttgggctgaaaatgaattagcgactatgggtaaaatcgctttagctgaaaaatttatgattggtatttttgtcgttgcgttaacactatggattgtcggaagtttcattcatattgatgcaactttaacggcctttattgcgctagcattgttattattgacaggcgtcttaacatggcaagacattttaaacgaaacaggtgcttggaacacattagtatggttctcagtattagtgttaatggccgaccaattaaacaagcttggatttattccttggttaagtaaatccattgctacaagtcttggtggcttaagctggcctatagtcctggtcattttaatattgttctacttctattcacattacttatttgcaagttctacagcacatatcagtgcgatgtatgcagcattactaggcgttgccatcgcagccggtgcaccaccattattcagtgcattaatgttaggtttcttcggtaacctattagcttcaacaacacactatagtagtggtccagcgccgattctattctcttcaggttacgtgactcaaaaacgttggtggacaatgaacttaatattaggtttcgtctactttattatctggattggtttaggatcactttggatgaaagtaattggtatattttaaaatatttaaattagcgctcgaatctcattgatttgggcgctttttaatttgtatttaaaatcaacctttgctaaatcaagactccctttttaaaatacgtttatcctttaaatcattgcgtgcttcactgaaaatttgtataaagatttaagtcattacgtaacatcacataaaatacatttctatactattccgcttcattgattaacattacgtatgccctcataaatcatcatacaaaaaacaccttcgtttaaattcattttaattgcgaattcaacgaaagtgccttatttcatatttaatgtttcaaatttatacgtctgtcactgttactgcacacatacctcagtctcacctcatcatgacacaaaggatattgaaaacacgtataattatctttcctcgtattttatagggtttttgcgaccggatgtttcttcaatttaatgtattgagaaagactatataacacaatacctgtccaaataaatataaacgtaattaattgatctatactaaaaggctctttgaaaacaaatatgccgagtacaaacattattgttggtccaacgtattgaataaatcctattagcgaaagtggaatacgttttgccccggctgagaataggattagtggtattgccgtaatagcaccagaaaataacaaccaaaatgatgacatgttcaatccaaatgacatctgatgttgctgccataaataaataacgtatattagtccagcaggtgcggtaacaatacattcaatcgtaatactgctgatggcatcaatatgtactacttttttcaataatccgtatgtaccaaaggataacgctaatataatagagacgattgggaattctccaatcttgagcgtcatatataatacaccgatgaatgcgaataaaatggctagccattcaaatttattgaatctttcttttaaaaagataagtgcgagcaaaatgctaacaagtggatttatataataacctaaacttgtttgtaggacgtgaccgttcgttacagcccaaataaatgtaccccaatttaatgtaatgacatagcctgctacgacaatcgctaatagctgaatgggcttgcctaacaattgattcatatctcgttgaaatgcattgcgttgtttttgtccaaccgcgagtatgaaaatcatgaatattgctgaaaatataatacgaaaggctaaaatttcaaatgcgcctattgcatcaacgaactgccaatatataggtagtattccccacagaatgtatgcactgagtgctaaaaatatgccttttttatactctgaattcaccttcaaacctccttactttcctaatttttaatttactgcatacgctcacttggttatgctaatataacgattttactaataatatttcgataaagatatcattttgtttatatttcccacatttattcaccaaccactaaacaatattaattttataaataattctgtacaaatcagggtatattgccagaaagactaccatacaacataaaggatggatacaaatgactttacctaaaattggaaagcctgcaacacgcgcgctaaattcacaaggtatatacacattagaagcagtatcacaatatacgaagtcatctctaatggagatgcatggcgttggtcctaaagctatatcaatattggaacaagctttatttcagcaccaactacattttaaaacggaagttcagtcatcattaccttttaagttaacaggagatgtgtcatgcaatcatgcgcctaaacgtcaacaaatgatagattttatagttgttacagcagcattagatattgaattattacgttcactggttacaacagaatttatttggtctgtccctggccgctttgacatatacggacctcaaatattaattcaagaactatctaatcattacaatcaggttgctagtctcaatatccattccagcatcacacatgggtgcttaggttccatgcatggtattgaaatattaaaaactggtaaagagattcattttgctcatttttttgaatttgaaaatcataaaaaggatgccaagttaagcaaagtgacatcttacattgttgttggttaatttatcaaattatatatatcgcaaaaaatcttttgtggttacatgtatatttttatataacaaataatttggcataacatttttgttatatgaacacttattactagagtgcccattgaacatacagtatgattaaatatcatgttatgaaagaaggatatattttgactgtttttaaaaatgagcgcttaagctggttaccatacatagctattgtcattttgttacacgttattgggtttagttttttatggattgctggaaaagaccatcatatcttatttggtatggggattcttgcatatacattaggtttgcgtcatgcatttgatgcagatcacattgctgcaatagataatacggttcgcaaattattacagcaacgcaaagatccatctggtgtgggtttctatttttcaattggacattcatctgtcgtatttttaatggctgtttttttaggggtatctgtaaaatgggctaaagatgaattaccgcatttccaagatattggtggaacgattggtacactagtttcaggtttctttttagtgcttatcggtgtgttgaatctaattattttaatctctttaattaacttgttcgctaaattacgtcgtgaacacattgaagaagctgaagtcgatgcattacttgaatctagaggattggtttctcgatttgtaggaccttatttcaaattaatcacgcgtagttggcacgtattgccacttggctttttatttggacttggttttgatacagctagtgaaattgcgttactcgctctttcttcaggcgcatcacaacaagccatttcatttatcggaatcttatctttaccaattttattcgcatcaggtatgagtttattggatacattagatggtgttgtaatgaagtatgcctataattgggcattcttcaatcctattcgcaaaatctattacaatataacgattactgcgatatcagtcatggcagcattagtgattgggatgattgaattgctacaaattcttgctgataagttagatttacatggtgcgttttgggcattcattggttcgatcgaatttgattatttaggctatattttagttgcattatttttaattacttggcttatttcaagtttaatttggaagtttggtcgcatagaacacaaatggtctagataaggcaacttgtcttgcaactacctttgtattgttgcatttttagacaccctgcacacttcttccattatgctacgctctcagtagtcatctttaaatcgtttcttttagagatgacttcattttgagagcgtatttttctatttaaaatgtatttatccaaaattcaatgctttcgaatttaaaatttcagtatttctgtttaaaatttaattataatctttaatacaggaggcgctatgcttatgaatattgcgaagttagagaattatttacaaattgattcatctcgttataatcgaccgagtattgaagcattaaattattatgcaacacgttttatgttaactgtaccttttgaaaatattgatgttcaaaatagtaagccgatatctataaatatcgatgcactttttaataaaattgttcatgataaacgtggtggtttttgttatgaattaaatacatttttcaaagcctatttacaacaaaaaggatttaatcctgaattaatgtcagctactattcacacacccggtggcggtcgtagtctgaacggttcacatgcttcacttgttgtttctataaatgatgtattctatgtaactgatgttggctttggagacttacctctacatgccattcctattacttcatctgagcatacacaaccaattactgatatcagtggtacattccgcgctatttttaacaacgaagacaaggatattttctatgttcaaaaattcgaaaatgatcattggcatacaaaatatgaagctgaattcaaacctaaacaaatagaagattttaatagcaacatcgaatataatcaaacgcatccagattcaatatttgtacagcatttattaattacaatgccacaatcatttggccgtgctacaatgtctgaaaatcatttaactttaacaaggaatggtagctcagaaaaatttgatgtcactaaagataactataaacattttttagaaaaatattttggactaaatgtaactattaatcgtattgaaaaacaataatagtaaaatataaaaatatgggcgtatcttacttattgtaggtagcgccccttttttatgcttcataaacacaacaaaaaggatatgacacaaacttcatgtcacacccttcttttgaaccgcttcattttacttaagcaagtgcatctacaacataaatgacacctacgaatacaaatgcaatagcaatcatcgtcgaaataaagacgatacccattaatggattaaataataaaatgacaccgaaaacaatacctaataaattaaaaatcactgaaattagttttaagctaccactacccgaaaacgtaaataatccagagatagaactaaaaataaaccaaaaagcaaacatataaataaagaatgctgaacttgcgccaacattaaaaataactaatagaccaaatagaatatctacaatccccataaacagaatccaattttggttaccacctactaaagcttttgcttttctacggtaaacgatttgaatcacaccgttaattaatacaaacagtccaatcaaccaggtaatagcataaaaattttcaattggaaatgtaaaaataacgactgccaacattaataataatacacccattattaaactagaccatttaataccttgatttcctttttccataacaatcaattcctttcaaataaaaccctcttttaatttttacaaaaaatttattatacaataattaaattcccttttctcaatttacacaaacatcatcacttagaaagcaccattgcttttgtctaatatgtacgatgaatctgtatcctcactcaaaaatctactaagtagcgatagctttcaactctgtaaggttcattcattgaattgtaagtttagataaaggctactactccaaacattatttaaaatgaaattaaatacaaaaggagtgagactatgacgatattatcagtgcaacatgtttcaaaaacatacggtaaaaagcacacatttcaagcacttaaagatattaactttgacatacaaaaaggcgaattcgttgcgattatggggccttctggatcaggtaagacaaccttattaaatgtactaagttcaattgaccaaatttctagcggtagcgtgattgctaacggacaagagcttaataaacttaatcaaaaagcacttgccaaattccgcaaagaatcattaggtttcatcttccaagattacagtattctgccgacattaaccgttaaagaaaacattatgttacctttatctgttcaaaaaatgtcgaaggcaacaatggaagaaaattataaagcgatcacgacagcattaggtatttatgacctaggaaataaataccctagcgaattatctggtggtcaacaacaaagaactgcagcagcgagagcatttgttcacaaaccacaaatcatatttgcagatgagccaacaggcgcactcgactcgaaaagtgcaaatgacctattacaacgtttggaagaaatgaataaatcgtttgatacaactattgtcatggttacacatgatccggttgcagcaagttttgcagaacgtgtcatcatgctaaaagatggccaaattcatacacaactttatcaggaaggacgttctaaacaggccttttatgaagacattgtacatcttcaatcagtattaggtggtgtctcaaatgacatttaaccatatcgttttcaaaaacttacgacaaaacttaaaacattatgcaatgtatttattttcattattttttagcatcgtcttatatttcagttttacaaccttacagtttactaaaggtgtaaataatgacgactcgatggccatcattaagaaaggtgctttagtcggatcaatatttttatttatcattattgtcatctttttaatgtatgccaatcatttattcgtaaaacgccgtacacgtgaatttgcgctatttcagttgattggtttaacacgacaaaacattttgaaaatgttagcacttgaacaaatgatcgtatttttaatcacaggtgttgtcggtgtattatgtggcattgcaggtgcacaattattgctttccatagtatctaaattgatgtcgttatcgattaacttatcgatacatttcgaacctatggcccttgttttaactattttcatgctaattattgcgtatgtactgattttatttcaaagtgctttatttctaaaaagacgtagtatcttatcaatgatgaaagattcaattaaaactgatgccacaactgctaaagtaacgactgcagaggttatttcaggcgtattaggtattgctatgattgcactaggctattatatggcgacagaaatgtttggtacgttcaaagcactaactatggctatgacatcaccgtttatcattttatttttaacggttgtaggcgcctatttattcttcagaagttccgtgtcacttatttttaaaacattgaaaaaatcaaaaaatggacgcgtatctattaccgatgttgtattcacatcgtctattatgtacagaatgaagaaaaatgccatgtctttaactatcattgcaattatttctgcagttacagtaactgtattgtgttttgcggcattatctaaatcaaatacagatcaaacccttacatctatggcaccaaatgaatttaacgtggtcgctactcaagatgctaaacaatttgaaactaaactaagccaacaacaaattacattttctaaaaatgcttacgaaactattactgtagataatgttaatgatcaggttattactttggaaaatggtagtgattcaggtcgcacgaattctattttaagtgcaaataacaagttaacaggcaacaatgccatcattacaaatacaaaatcgctgcctaacattattaatatccatttaaacaaagatttagtagtaaaaggtactaagaatgaaactttccgtgttacacaagaagacaaaggtaaggtttatcctttaaatctaagcttcaactcacctgtcatcgaagtaagtcctgaaaagtatcagcagttgaaaacacaaaataacgttcatactttttatggatatgatattaaacaaacatcacaaaaggaaaaagctcaagcaattgcaaaacagtttggagacaaagtcatcacgtatgatgaaatgaaaaaagaggtcgatgctactaacggtattctaatatttgttacatcatttttaggattagcatttttagtagcagctggatgtattatttatattaaacaaatggatgaaactgaggatgaactaagtaacttcagaatattaaaacgcataggctttacgcatacagatatgcttaagggattattattaaaaattactttcaacttcggtttaccattattgattgctatattacatgcagtattcgccgcaatagcatttatgaaattgatgggtaatatttccttcatgccggttattgtagtaattgttgtatacaccctcatttacattacttttgctttaattgcttttatacattcaaacaaattgattaagaaaaccatttaacacttacgattaaaagatgcttcattagatattttgattttaagcaatgcagtataactattaattgatttaagaaaaggagagattgaatcatgaaatttagagaattagtaaaacaatcatatgaggatttgaaaaatttgactgtaacttggtataacgtcattgctttaacaatacttgttattgtattaagctcattcacaacaccaatgataggcattccagctggtttattaggtggcgcctattatttaaaacgtcgtgaagaaaaaggtaaataaataagccttatgtgctaaactcaatatgtatttcctaccaaagaaaacataaggagtttggacatcttgaaggagatactattgttggtcgtcgtcatggtagtgcaatcattactttggtagaaagagtatccaagatgattatcaccttacgacccttaggtcgtaaggcaactgatatagaaaacgctctacactcaatgttttcatctttaccttctcatatatttaaatcaattacttttgattgtggtaaggagttctcaaactggaaaacattatgtaactgtcacgatatatctatattttttgctgatccaggcacgccatcacagcgaggtttaaatgaacattctaacggaatacttagacgcagtggattagataaagaactagatttcaatttagtaacagacgatcatatcatcagtgttgctcaaaaaatcaatcatcgtcctagaaaatctttaggttatagaacaccattggaagtatttatgagtttcatcgaagatgataaacttgtccagcttaatttgacaatctaaagatttataaaaaagccgttggtctcttcgaaactacggcttttctctgtgctataaaatcagtatggcgaagcacagtgatcattgaattctgactttatataatcaagagtatctttggatacactgatgatatctataacagcattgctaatgtagaatatattttcttgattatagaatacaataaatggctccactaaaccttttttaatatataaagaataatcaattaagtctttgttttttatatttttaatagttgcaataacatacttctcatcggtagaatggatttcttcgtaccagttagtaatattaaaaaaacgaccaattcttgttttttctctaaatttaacaggatataagtattcagacaaaaatgtacatttcgtctttgattggttattaaatataacattaataatattagaaatttgctttttattgagaacatcaatatctaagcgtatcctatttttctcaggtgcttgaaaatagggaatttcatgttctaaatcaaaatgtatttgttgtgtttcaaggttaataatcattttaatctccaattctttttaggttagcatcgtatgtaccacttcttgttttcttgctacctaaattcttaatactgcttgcaccttttcattttatcttctcatatatttaaatcaattacttttgattgtggtaaggagttctcaaactggaaaacaatatgtaactgtcacgatatatctatattttttgctgatccaggcacgccatcacagcgaggtttaaatgaacattctaacggaataattagacgcagtggattagataaagaactagatttcaatttagtaacggatgatcatatcatcagtgttgctcaaaaaatcaatcatcatcctagaaaatctttaggttatagaacaccattggaagtatttatgagtttcatcgaagatgataaacttgtccagcttaatttgacaatctaaagatttataaaaaaggagagattgaatcatgaaatttagagaattagtaaaacaatcatatgaggatttgaaaaatttgactgtaacttggtataacgtcattgctttaacaatacttgttattgtattaagctcattcacaacaccaatgataggcattccagctggtttattaggtggctcttattatttaaaacgtcgtgaagaaaaaggcaagtaagcacattccatcggtatagaacattgctatgacctttcaagtcagattttaatatcaacaagtagcgtttatcgctgcttgttttttatggattgcttataaaatcatcatgtttaaacgatatgtcactttgaaaactagcaaacaccataaaagactacaatttttttatttttataaacccctttaaatcaacgtttctaaggtttttaaaaatcttttttaatttattttcaaaaaacactgtacattatgccaatatgagcgtatagttggtcttacgtaataaaagctcgtgaattaaattgtagtgtatttgtttagaatatcctcttttttagttatgaatttgttacaaatattaagtgcaaaagcacacggaggttttctatatgaataacggtacagtaaaatggtttaacgcagaaaaaggttttggtttcatcgaacaagaaaatggcggagacgtattcgtacatttctcaggtatcgctagcgatggctacaaaactttagaagaaggtcaaaaagttactttcgaaatcactgaaggtcaacgtggagaccaagcagttaacgtacaaactgtttaatcttacaacataaaacgactcattataaatgaatcgctttgattaccaacaaggttctaaatcttgttggtatttttttatgctattttggataatataaataatatgagacgataccacgatgatttataaaaacttatttgccaaatacacactaaggaaaattatgaggctgagtataccaattactgatataatagaaagcgcatttgtcatcgtatttctagctttagtcgtttgtacttcactaagatcttttccattcataaaagcaacaattcgatcgtagttgtccattttatgcactttttttaaatcttctattttcatagatgcataaaaacctattcccaaaatgattgccaccgttacaccccaagtccaattccaataaacaactaaaggtcccattaaaattgcagctaatgtcatgaaaataagcatcacatatgtccataagttaagacttcgttgcgctttaatatcaggtacaaatggaatggtcccttttactaaatcatctaaagttacattgaacaattcacacatcattaataagttatgtatgtctggtaagcttttgtcattttcccaattagaaatactctgcctagatacatataacttttcagcaagatattcttgtgaataaccatctcgttccctatactttttaatttgtttactcagattcaattacatacgcctccagtcaattagtacaatcattacaatcagactatcagataaagttaaatcaagtcacctttatgattgactaaatgttttgacatacgacaacatcggggttcgaagactcccttaagacagacctgtatgattacgcgcttgtaattttctcaatgccaacttgaatttcacttattaatgatgcaacttttccatgctattcaatgcttgcaaagttagtcctagttaagagattacgttcacactatttactattcgattttccagctttccaactatgcttttctaatcttttttgtgctataaattctaccgcttcaaaaatacatactgcactgatgaaccagcttaggaaaccaacaacaatgctaatcaaccacatgtgcgtcatatgtaacatcatccatgtaactaaaatacaaactaatacccctgtcataccaaacactgcgccacgacttacatgcacagcgactttatcaccatattgcatacctgtaataaacatagacactaaaaatactgccggaaacgttgcaaatataccgccaaattctttccaaggtagtgttacagatacaatataacttaataatactgcaaatccccccacaaaaaatttcattaatgttaatttcatgatgttctgcctccaataatttattacttaataactgaatacaactaattatcacgcattttccaaactataaatgtctaatactgaatattgcgagggaaatgacaaaccaacaaacaactgtgaatattgcgcctttccgataacctttatgcttaatgtagagagatgtcaaaaatacagttaatatacaagacagaataccgacaattgctccagtactaagattcatcgacatctccactaattgcgtaccacgatgatctaaagctaatgcgataatagccgcaagaaagactgccggcatagtagctataatacctcctaacttaccacctaccttatcagcaataattgaagctaatgcaacagcgataccaccaatgacaaaatgaagaattgcacttccaattgaaaacatcttcaacgtacctttctataattaattcaatacaaaacgtatcattcacacaaagtgtaaaacttaaattttctactgtaaaggcaactcaagcgatgttcataaagctttcatgatactttcataaactagcaataaagggttcaaatgaaagtatatccagctcaaattagggagtgggacagaaatgatattttcgcaaaatttatttcgtcgtcccaccccagcaaggttgactagaattgaaaaaagcttgttacaagcgcattttcgttcagtcaactactgccaatataacttcgtagagcatagaacattgatttatgtaccagcctgatcaacatataaatataaatttttatgtttcacgtaaaacaaaaaaaaaagacaaagctgttatgatcttagctttgtcttttatgtgttagtcatcatgtatacgacatcctactactaacgtttatatattcgaatttttatttcataataatcttcatgatctttgtctttatgctcaacatgtaatcctgtttgttgaatcgcttggatacttttgcctacctcatctcgtgcttgagtgacatcttgtgcaaagcgaaggttttgtgctttgactttttcgggccccgttttttggcgtactctatcttcagtctgtttcacatttagcttttgtgcaatgacttgctcaatcaacgcttcttgttcgctatcagacaatgataataccgctctcgcatgacgttcagtaattttaccttctcttaagcgaagtagtactttcggcgccaacttcaataaacgcaacttatttgcaataaagctttgacttttacctaaactttttgccaattcactttgcgttgtatcaccaatttccaataatttcttataggcttccgcttcttcaacaacagacaaattttctctttgaatattctcaattaatgcaacaacagccgtctcttcatcatccatatcacgaataataacgtctgcttgaggtaaatttagtgattgtattgctctaaatcggcgctctccagcaataatttcaaacatatcttcttcaatcggtcttacaacaataggttgtagtaaaccatgttcatgtattgattcagcaagttctttaattttatttggttcaaacacctgtcttggttgataacggttgggaacgatacgttcaatttgaatggattcaacattactattgcgatcttcttcaatatgtccaatgatgtcatctttgtttttcaaaccaaataattttgaaaaaggttttttcattatccattcgctccttttatgttagttgtaaaggattatgcattatttttcaagtaaaggagtcttattaggcgtccctggttttcttggatactttttcggcgtctgtctttttttatcaataatgaacatctggcgctctccagcatcttctggcaattcaaaggtatgtgtttctgtaacattaccacctaacacactaattgcaaattttgcttcttctaattcttcttcaccttttgaagattttaatgcaacaaactgtccaccttttttaactagcggtaaacacaattcacttaacacggataatctagctactgctcttgcagtaacaacatcataagactccctgtagacacccttaccaaatgtttctgctctatcgtgtataaagctgacatcctgtaattgtaattctgacgctaaatggtttaaaaattgaatacgcttatttaatgaatcaacaatcgtcacttttaactgcggaaacattatttttaacggaatacttggaaaaccagctccagcgcctacatcacatatacttataggctgattaaaatcaaaataaaaactaggtgcaatggaatcataaaaatgtttcaaatatacatcgtgttcatctgtaatacttgtcaaattcatcttttcattccattcaacaagtaaacgataatatgtttgaaactgttgtttttgagtctcagttaattgaatattatgttcttttaattgttctgctaaccattctacagtcattagtcactcaccctttggagtttaccttgttctaagtaaatcaataatatagatatgtctgctggatttacccctgatattctagaagcttgtgcaatatttaaaggttttacttctgataatttttctcgcgcttcagtcgccaaactatcaatcttactataatctaagtcttctggaattttcttctcttccatacgcttaactttctcaacttgttgtagtgatttattgatataaccttcatattttgtttgtatttctacttgttcttcaacatctgcattcaattgatgttcttcttctaaaagttctaaaattatatcgtaagtcatttcaggtctgcgtaataaatcgatagctaaaataccatcttttaagcgagaaccaccatgttgttcaataatcgcttgcgtatgttcgtttggtttaatacgaatatctgataaacgcttaatttccgcatcaatttgctgacgtttttcattaaaacgtgcatatctttcttcagaaatcataccaagttcatatcccatatccgtcaatctcaaatcagcattatcatgacgtagtaacaaacgatattctgcacgtgatgttagtaaacgataaggttcattagtacctttagttacaagatcatcgattaagacaccaatatatgcatctgaacgacttaatatcttttcgcctgtgtttaacactttacctgcagcgttaatacctgccatcaatccttgtcctgctgcttcttcataaccagatgtaccattaatttgacctgcagtatataagtttttaatcattttcgtttcaagtgtaggccataactgcgttggcacaatcgcatcatattcaattgcgtagccggcacgcatcatatctgctttttcaagacctggtatcgtctctaacatttgacgttgcacatgttcaggaagacttgtagacaatccttgcacatatacttcatttgtattacgaccttcaggctctaagaaaagttgatgtcgcggcttatcattaaatcgaacaaatttatcttcaattgaagggcaataacgtggcccggttcctttaatcatccctgaatacattgcagatagatgtaaattatcatcgataactttgtgtgtttcagcattagtatacgttagccaacatggcaattgatctaatatatattctgttgtttcaaagctgaatgcacgacctacatcgtcacctggttgtatttcagtcttcgaatagtcaattgtttttgaatttacacgcggtggtgtacctgttttaaaacgaacaatatcaaaaccaagttctcttaaattgtctgataatgtgattgatggtaattggtgatttggtccacttgaatacttcatattacctaaaatgatttcaccacgtaaaaatgttcccgttgtaataattactgctttagataaatactctgtaccaatatttgtacgtacacctttaacttcattatcttctataataagttcgtctaccataccttgcattatatgcaaattttcttcatcttcaatcacgcgtttcatttcttgttgataaagtactttatctgcttgcgctcttagtgctcttacagcaggtcctttacctgtatttaacattctcatttgaatgtgtgttttatcgattgtttttgccatttgtccacctaaagcatcaatttcacgaacaacgatacctttagctggtccacctacagatgggttacatggcataaatgcaatattatctaaatttattgttagcattaatgttttagcaccacgtcttgcagatgctaaacctgcttctacacctgcatgtcccgcacctataacgattacatcatattcttgaaccacaatataaacctccttatttgatatcttactagccttcttaagacggtattccgtctatttcaattactatttacctaagcagaattgactgaataactgatcgatgagttcatcacttgcagtctcaccaataatttctcctaatatttcccaagttctagttaaatcaatttgtaccatatccataggcacaccagattctgctgcatcaatcgcatcttgtatcgtttgtcttgcttgttttaataatgaaatatgtcttgaattagaaacataagtcatatcttgattttgtacttctccaccaaagaacaaatctcgaatttgtatttctaattcatcaataccttcttgttttaacattgaagtttgaattaatggcgtatcacctatcatatctttaacttcattaatatctatgttttgctctaaatccattttattaacaattacgattacatcttcatttttaaccacttcatataatgtgtaatcttcttgagtcaatgcttcgttattgtttaatacaaataaaattaagtctgcttggctaagagcctttctagagcgttcaacaccaatcttctctactatatcttctgtctcacgtataccagcagtatcaactaatcttaatggcacgccacgaacattgacgtactcttctaagacatctctagtagtacctgctacctcagttacaatcgctttattatcttgtattaaattatttaacatcgatgatttacctacgtttggtttaccaacaataactgtagataaaccttcacgcataattttaccctgcgcaccggtatctaataaacgattaatttcctgtttgatttctttagactgctctaaaagaaattcagtagtcgcatcttcaacatcatcgtattcaggataatcaatattcacttccacttgagcgagtatctctaatatagattgacgttgttttttgattaagtcacttagacgaccttcaatttgattcatcgcaactttagaagctctatctgtcttcgagcgaataaagtccataactgcttcagcttgagataaatcaatacgaccatttaaaaaggcacgttttgtaaattcacctggctcagccattctagcgccatatgtcatagtaagttccagcactctattaatcgttaaaataccaccatgacaattaatttctataatatcttcgcgtgtaaatgtttttggcgctcttaacacagacaccataacttcttcaaccacttctttagactctggatcaataatatgaccgtaattaatcgtatgtgatggaacatcatttaaaagatgttttcctttatataatttgtcagcaatttcaacggcttgcggtccagacaatcgaacaattccaattgccccttcacccattggtgttgaaatactcgtaattgtatctaaatccatattgctactcgcctccttcaacgatgtgaatacattttaaagtaagttattataaccctaaggtcagtcttacgtttgtctgaggtaagacttcgggatgtgttgagtggttaatgttttccttcccctaccctatccttacttaatctttttattaaaaactttggcaattttaagtacgtgctcaagactattctgtatttgtaaagtcgtcatatctttagctggctgtcttgctattacaataatatctttggccaatatatgcgacttatgtactttgaaattttcacgtattgctcttttaatcttgtttcttaacactgcattacctagttttttagaaacactaatacctaagcgaaaatggtctatttctttattattacaagtgtatacaacaaattgtctgttggctacagaatgaccttttttatatattctctgaaaatctgcattctttttaattcggtaagctttttccaataacatcactcgcttatttatcgtttttatttgaagctatatttaaacttctattgagcttataacataaatttctatttattcttaatttaaacgaaaaaaaagatcactgatgagtcagtgatcttatgcagataaaactttacggcctttacgacgacggcgcgctaaaactttacggccattttttgtgctcatgcgttttctgaaaccatgaactttactatgtttacgtttatttggttgataagtacgttttaccatgcaaaacacctccatctttatacagttatctaatataccagattatgcagactctgatcactttaatagataagattttgcgtttcttagattaaaattctcgtattagctcattgattatctagtcataattcaagcaactactacaatataacaaaatcctatttataacgcaagttcattttatactactgctcaatttttttacttttat
